(19) United States
(12) Patent Application Publication
(10) Pub. No.: US 2006/0088823 A1
(43) Pub. Date: Apr. 27, 2006

(54) Microarray gene expression profiling in clear cell renal cell carcinoma : prognosis and drug target identification

(76) Inventors: Brian Haab, Jenison, MI (US); Daniel Rhodes, Jenison, MI (US); Bin Tean Teh, Ada, MI (US); Masayuki Takahashi, Kentwood, MI (US)

Correspondence Address: MCKENNA LONG & ALDRIDGE LLP, 1900 K STREET, NW, WASHINGTON, DC, 20006, US

(21) Appl. No.: 10/473,173

(22) PCT Filed: Mar. 29, 2002
(86) PCT No.: PCT/US02/09576

§ 371 Date: Jan. 11, 2005

Related U.S. Application Data
(60) Provisional application No. 60/279,411, filed on Mar. 29, 2001.

(51) Int. Cl. C12Q 1/68

(52) U.S. Cl. 435/6

(57) ABSTRACT

A nucleic acid probe or a novel set of such probes in a microarray is provided. The probe or probe set is useful in the prognosis of patients with clear cell renal cell carcinoma (CC-RCC), wherein aggressive and non-agressive CC-RCC tumor types are characterized by differential expression profiles of genes that hybridize with one or more of these probes. Microarrays and kits

### BACKGROUND OF THE INVENTION

[0001] 1. Field of the Invention

[0002] The present invention in the field of molecular biology and medicine relates to gene expression profiling of certain types of cancer and use of the profiles for prognosis. Specifically, the differential expression of a limited set of genes permits prognosis of an aggressive form of clear cell renal cell carcinoma (CC-RCC). Other genes are up- or down-regulated in most cases of CC-RCC; these are used for early diagnosis and/or drug discovery.

[0003] 2. Description of the Background Art

[0004] CC-RCC, the most common form of adult kidney cancer, is caused by neoplasia of proximal renal tubular epithelium. CC-RCC is a prime example of a clinically heterogeneous disease for which treatment options are largely ineffective for advanced stage tumors. The cancer is more common in men than women, especially men over 55 years of age. It affects approximately 3/10,000 people; 18,000 new cases arise in the U.S. annually, of which about 8,000 result in death; worldwide fatalities are estimated to exceed 100,000 in 2001. CC-RCC represents 2% of all malignancies and 2% of all cancer-related deaths. Approximately 30% of patients present with metastatic disease and life expectancies averaging only 9 months.

[0005] RCC, originally named hypernephroma, was found to originate in the proximal renal tubule (Oberling et al., Nature (1986) 186:402-403) leading to its renaming to renal cell adenocarcinoma or renal cell carcinoma. RCC has been subdivided into clear, papillary, granular, and mixed cell variants based on cytoplasmic features. But the prognosis of RCC is based on staging and histological grading rather than the above classification.

[0006] A subtype of renal neoplasia with granular cell features, renal oncocytoma, which had excellent prognosis is described by Klein et al., Cancer (1976) 38:909-914. Thoenes et al., Virchows Arch B Cell Pathol Incl Mol Patiol. (1985) 48:207-217, describe a subtype of RCC with clear cell features, closely resembling an experimental renal tumor in rats, naming it chromophobe renal cell carcinoma. Fleming et al., Histopathology (1986);10: 1131-1141 describe yet another renal tumor, originating from the collecting ducts, named collecting duct carcinoma. Overlap of granular and clear cell features among tumors with marked clinical, pathologic, and phenotypic differences promoted the need for a new classification. Thoenes et al. (Pathol Res Pract. (1986) 181:125-143) proposed a new classification for renal tumors of tubular epithelial origin (the “Mainz classification”) based on conventional histopathologic criteria that include all the new entities described above.

[0007] The Mainz classification is now widely accepted; cytogenetic studies have confirmed characteristic genetic alterations of each tumor type (Yoshida et al., Cancer Res (1986) 46:2139-2147; Kovacs et al., Proc Natl Acad Sci USA (1988) 85:1571-1575 and Histopathology (1993) 22:1-8; Walter et al. Cancer Genet Cytogenet. (1989); 43:15-34).

[0008] The term RCC embraces a group of renal cancers all of which are derived from the renal tubular epithelium but each with distinct clinical, pathologic, phenotypic, and genotypic features.

| | Relative |
|---|---|
| Tumor Type | Frequency |
| Renal Cell Carcinoma: | |
| Clear Cell | 70% |
| Chromophil (eosinophil, basophil) | 15% |
| Chromophobe (typical, eosinophil) | 5% |
| Collecting Duct Carcinoma | 2% |
| Renal Oncocytoma | 5% |

[0009] CC-RCC is the most common adult renal neoplasm (70%). The tumor can be 1 cm in diameter when discovered (usually incidentally), or as bulky as several kilograms. Most often it manifests with pain, as a palpable mass or with hematuria; a variety of paraneoplastic syndromes have been described. CC-RCC may first manifest with metastases after being clinically silent for years. The characteristic gross appearance of the tumor is solid, lobulated, and yellow, with variegation due to necrosis and hemorrhage. Tumor may be well circumscribed, or may invade the perirenal adipose tissue or the renal vein. Cystic degeneration is common, though some tumors are predominantly cystic (Hartman et al., Urology (1986) 28:145-153). Of the 70% of patients with initially non-metastatic disease, approximately 30% relapse after surgery and usually succumb (Levy et al., J. Urolog. 159:1163-1167 (1999); Ljungberg, B et al., BJU Intl. 84: 405-411 (1999)).

[0010] The most common and consistent genetic finding in CC-RCC has been chromosomal (3p) loss (Tajara et al., Cancer Genet Cytogenet (1988) 31:75-82), along with amutation in the von Hippel-Lindau (VHL) gene in the other chromosome 3. In about 50% of sporadic CC-RCC cases, the VHL gene, located in 3p25, was mutated (Gnarra J R et al., (1994) Nature Genet 7:85-90). Reports of frequent loss of heterozygosity (LOH) in chromosome 3p13 and 3p14 suggested that other CC-RCC related genes exist in this region. Indeed, there are families with familial CC-RCC not associated with the VHL gene or chromosome 3 translocations (Teh, B T et al., 1997, Lancet 349:848-849), further supporting the notion that other CC-RCC genes exist.

[0011] To date, there have been no effective tools to identify those patients who will go on to relapse. Though the stimulus for RCC neoplastic transformation has not been identified, many associations with etiologic factors have been evaluated. Cigarette smoking is a prime risk factor. Incidence of CC-RCC is significantly increased in endstage renal patients who develop acquired cystic kidney disease. Although the tumors typically arise in the renal cortex, they may invade the renal vein and extend into the inferior vena cava. Paraneoplastic syndromes such as hypercalcemia and hepatic dysfunction in the absence of liver metastases have been reported.

[0012] The Union Intemationale Contre le Cancer (UICC) recently developed an improved system for classifying CC-RCC known as the “TNM” classification (referring to tumor, lymph node and metastasis). T, N, and M categories are determined by physical examination and imaging. (Sobin, L. H. et al., eds., TNM classification of malignant tumors. 5th ed. (John Wiley & Sons, New York 1997). This system is set forth in the table below.

[0013] Approximately one-third of initially diagnosed CC-RCC patients present with metastatic disease, and 40% of individuals undergoing surgical resection or radical nephrectomy will eventually develop metastasis. Among individuals with metastatic disease, approximately 75% exhibit lung metastasis, 36% have lymph node and/or soft tissue involvement, 20% have bone involvement, and 18% have liver involvement. The literature also reports low incidences of metastasis in contralateral adrenal glands, brain, uvula, diaphragm, and digits (Levy et al., supra). Spontaneous regression of metastases after nephrectomy occurs primarily in men with pulmonary. metastasis and are not equated with long-term cure. The frequency of spontaneous regression is only 0.4% and may reflect the development and/or enhancement of immune responses.

### TNM Clinical Classification

[0014] T—Primary Tumor

[0015] TX Primary tumor cannot be assessed

[0016] T0 No evidence of primary tumor

[0017] T1 Tumor is ≦7.0 cm in greatest dimension, limited to the kidney

[0018] T2 Tumor is >7.0 cm in greatest dimension, limited to the kidney

[0019] T3 Tumor extends into major veins or invades adrenal or perinephric tissues but not beyond Gerota fascia
[0020] T3a Tumor invades adrenal gland or perinephric tissues but not beyond Gerota fascia
[0021] T3b Tumor grossly extends into renal vein(s) or vena cava below diaphragm
[0022] T3c Tumor grossly extends into vena cava above diaphragm

[0023] T4 Tumor invades beyond Gerota fascia

N—Regional Lymph Nodes (Hilar, Abdominal Para-Aortic, and Paracaval)

[0024] NX Regional lymph nodes cannot be assessed

[0025] N0 No regional lymph node metastasis

[0026] N1 Metastasis in a single regional lymph node

[0027] N2 Metastasis in more than one regional lymph node

M—Distant Metastasis

[0028] MX Distant metastasis cannot be assessed

[0029] M0 No distant metastasis

[0030] M1 Distant metastasis present

[0031] pTNM Pathological Classification: corresponds to the T, N, and M categories.

G-Histopathologic Grading

[0032] GX Grade of differentiation cannot be assessed

[0033] G1 Well differentiated

[0034] G2 Moderately differentiated

[0035] G3, 4 Poorly differentiated/undifferentiated

Stage Grouping

| | M | N | M |
|---|---|---|---|
| Stage I | T1 | N0 | M0 |
| Stage II | T2 | N0 | M0 |
| Stage III | T1 | N1 | M0 |
| | T2 | N1 | M0 |
| | T3 | N0, N1 | M0 |
| Stage N | T4 | N0, N1 | M0 |
| | Any T | N2 | M0 |
| | Any T | Any N | M1 |

[0036] Conventional treatment of primary CC-RCC is surgical excision. However, metastasis limits long term survival. In patients with symptomatically advanced CC-RCC, palliative nephrectomy and other tumor excisions may be the only therapeutic option (Ljungberg et al., supra). Radiotherapy appears to have only limited palliative effects, as CC-RCC's appear to be relatively radio-resistant. Chemotherapy, usually with vinblastine, hydroxyurea and/or BCNU, also shows limited efficacy and response rates to prolonged infusion of 5-fluorouracil range from <10% to 20% decrease in tumor size. (Dutcher et al., Proc Annu Meet Am Soc Clin Oncol (1996) 15:A725). Hormonal therapy has also yielded disappointing results (Bukowsli, Cancer (1997) 80:1198-1220).

[0037] Immunotherapy with cytokines such as interferons and interleukin-2 (Proleukin® from Chiron), and combinations of these agents is considered an encouraging area of therapeutic development.

[0038] The making of the present invention has focused the inventors' attention on the fact that CC-RCC may exist as two distinct types: aggressive and non-aggressive, and that this distinction is of prime clinical importance. In the aggressive form, the primary tumor grows more rapidly, tends to metastasize sooner, the metastases grow more rapidly, and patients die sooner. Patients manifesting the aggressive type typically manifest stages III or IV. Non-aggressive RCC, patients typically manifest at stages I or II.

[0039] Current diagnosis of CC-RCC is limited to histologic analysis (in addition to corporal imaging, e.g., by ultrasonography, CT scans and X-rays). However, these modalities lack the rigor to distinguish fully between aggressive and non-aggressive tumor phenotype as conceived by the present inventors. Moreover, delays in staging and diagnosis of primary tumors in pre-symptomatic patients narrows the window for successful treatment, particularly of aggressive tumors which may have progressed to metastatic tumor before initial diagnosis.

[0040] The marked heterogeneity of CC-RCC provides one of the greatest challenges in diagnosis and treatment. This complicates prognosis and hinders selection of the most appropriate therapy. With the publication of the sequence of the human genome and the advent of high-throughput genomic and proteomic screening technologies, the molecular classification of human cancers are beginning to improve and will surely lead to better diagnosis and more specifically tailored and effective treatment strategies.

[0041] Because approximately 30% of CC-RCC patients present with metastatic disease and a short life expectancy (see above) and, of those with initially non-metastatic disease, approximately 30% relapse after surgery, there is an urgent need in the art to identify this latter group of patients before relapse so that appropriate therapies can be offered. To date, no such prognostic tool exists. The present invention provides such a tool for the first time, supplementing the available diagnostic approaches with a genetic screening approach that distinguishes between aggressive and non-aggressive tumor types by the differential expression of certain selected genes, expressed sequence tags (ESTs), gene fragments, mRNAs, and other polynucleotides as described herein.

[0042] The present inventors and others (Golub, I R et al., (1999) Science 286:531-537; Alizadeh, A A et al. (2000) Nature 403:503-511; Perou, C M et al., (2000) Nature 406:747-752; Bittner, M et al., (2000) Nature 406:536-540) have proposed that gene expression profiling using microarray technology can uncover the underlying molecular heterogeneity of cancers, thus identifying new classification schemes and means for more accurate diagnosis and prognosis. Lander's group successfully distinguished between acute myeloid leukemia and acute lymphoblastic leukemia by gene expression profiles (Golub et al., supra). Alizadeh et al. (supra) identified two distinct forms of diffuse large B-cell lymphoma with significantly different prognoses. In these studies, the ability to arrive at a clinically relevant molecular distinction was dependent on known cellular or molecular differences which correlated with gene expression profiles. However, one cannot create a meaningful molecular classification of diseases for which such cellular/molecular information is unavailable. Moreover, many microarray-based gene expression studies have been limited to comparisons of malignant tissue with normal tissue (or related cell lines). Without follow-up clinical data, the most important molecular profiles and relationships may remain obscure. Genetic aberrations common to all CC-RCC (discovered by the present inventors and described herein) may be initial contributing factors to disease. However, the presently disclosed set of differentially expressed DNAs may be responsible for the ultimate course of the disease.

[0043] Relevant Genetic Markers

[0044] This section provides general information about a number of genes that the present inventors have found to be differentially expressed in CC-RCC of different clinical severity.

[0045] The gene for transforming growth factor βII (TGFβII) receptor (TGFβIIR) is of particular interest to this invention as the present inventors have discovered its down-regulation to be associated with aggressive CC-RCC. The activated TGFβIIR is a heteromeric complex transmembrane protein with intrinsic cytoplasmic serine-threonine kinase domains through which the receptor complex suppresses cellular proliferation via initiation of a tumor suppression pathway. The ligand for this receptor, TGFβ, has three known isoforms in mammals: TGFβ1, TGFβ2, and TGFβ3. These proteins are members of a ligand family for TGFβIIR (which includes activin and bone morphogenic protein).

[0046] TGFβs interact with the TGFβIIR which, in turn, recruits the complex formed between TGFβIR and ALK5 to form a heterotetrameric complex. This constitutively activates the TGFβIIR kinase (Markowitz et al., Cytokine Growth Factor Rev. (1996) 7:93-102). Other members of the TGFβ superfamily interact with different combinations of homologous type I and type II receptor serine-threonine kinases. The activated kinase phosphorylates TGFβIR at the GS box, a conserved sequence of Gly and Ser residues N-terminal to the kinase domain. A strong correlation exists between malignant progression and loss of sensitivity to the anti-proliferative effects of TGFβ, which is frequently associated with reduced expression or inactivation of TGFβ receptors (Kim et al., Cytokine Growth Factor Rev (2000) 11:159-168).

[0047] A number of mutations inactivate TGFβIIR They include truncation at amino acid 97, BAT-RII mutations (big polyadenine tract mutation in exon 3 of TGFβIR gene), Glu¹⁴² to stop, and single amino acid substitutions at various positions. BAT-RII is associated with frameshift mutation in a 10-bp polyadenine tract resulting in a truncated receptor that lacks the serine-threonine linase domain (Markowitz S et al., Science (1995) 268:1336-1338). Receptor mutations, like Thr³¹⁵ to Met, do not interfere with the kinase activity but nevertheless enhance metastatic potential by specifically impeding TGFβ-mediated growth arrest without affecting the induction of extracellular matrix formation (Grady W M et al., (1999) Cancer Res 59:320-346).

[0048] Whereas TGFβR mutations (other than the BAT-RII frameshift) are rare events in tumorigenesis, repression of TGF-βR expression appears to be a common mechanism enabling tumor cells to escape from negative growth regulation by TGFβ. Mutations inactivating TGFβIIR kinase prevent phosphorylation of Smad family proteins which participate in the tumor suppression pathway. However, a reduction in TGFβIIR signaling in tumor cells is often accompanied by increased expression and secretion of TGFβ which functions independently through its effects on tumor cells and promotes tumorigenesis and metastasis (Abou-Shady et al., (1999) Am. J Surg. 177:209-215).

[0049] Captopril an inhibitor of angiotensin converting enzyme (ACE) was shown to attenuate growth human CC-RCC xenografts in immunosuppressed mice (Hii, S I et al., (1998) Br J Cancer 77:880-883). Though captopril's action and role in tumor suppression is not understood, this molecule is known to up-regulate TGFβIIR expression indirectly (Miyakima A. et al., (2001) J Urol 165:616-620) and to be anti-angiogenic (Volpert O V et al., (1996) J Clin Invest 98: 671-679).

[0050] Tissue inhibitor of metalloproteinase 3 (TIMP3) is also of interest to the present invention as disclosed below and has been implicated in RCC in previous studies (Kugler, A. Anticancer Res. (1999) 19:1589-1592, Kugler, A., et al., (1996) J. Urol. 160:1914-1918; Lien, M., et al., (2000) Int. J. Cancer 85:801-804). Matrix metalloproteinases [E's) are a group of zinc dependant enzymes responsible for extracellular matrix (ECM) degradation. They include type IV collagenases and 92 kDa gelatinase (MMP-9). The balance between MMP and available free TIMP (TIMP3 is of interest to the present invention) determines the net MMP activity. The ECM serves as a barrier between endothelial cells and the underlying stroma. Metastatic cancer cells repeatedly cross this barrier in a process requiring proteolysis. Metastasis occurs when the MMP:TIMP ratio exceeds 1 (Kugler, A. supra). Conversely, down-regulation or an inactivating mutation in TIMP can also give rise to tumor progression and metastasis.

[0051] Kininogens and their cleavage products are conserved multifunctional proteins (Cottrell Ga., et al., (1966) Nature, 212: 838-839, Rawlings N D et al., (1990) J Mol. Evol. 30: 60-71). In humans, low molecular weight kininogen (LK, ˜65 kDa) and high molecular weight kininogen (HK, ˜120 kDa) are single chain glycoproteins made up of kinin domains. Specific hydrolysis by tissue and plasma kallikreins releases Lys-bradykinin (Lys-BK) and bradyknin (BK), respectively, and cleaves each HK into two disulfide-linked fragments (heavy and light chains). Both LK and HK result from alternative splicing of mRNA transcribed from a single 11 exon gene that maps to chromosome 3q26-qter in humans (Fong D et al., (1991) Human Genetics 87:189-192, Takagaki Y et al., (1985) J Biol. Chen:. 260:8601-8609). The importance of HK/LK and kinins to normal biologic function is supported by the fact that kininogens and kinins have been conserved through evolution, participate in multiple biologic processes including inflammation, regulation of blood pressure and vascular permeability, cardioprotection and pain modulation (Rocha et al., (1949) Amer J Physiol 156: 261-273), and by the ubiquity of kinin receptors in mammalian tissues.

### SUMMARY OF THE INVENTION

[0052] The present inventors set out to characterize CC-RCC at the molecular level by identifying genes whose expression was altered (up or down) in a large percentage of CC-RCC cases. Furthermore, using a clinically well-characterized patient population, they sought to correlate the global gene expression profiling of CC-RCC with tumor progression and clinical outcome, even in the absence of known cellular or molecular characteristics of these tumors.

[0053] They hypothesized that by correlating gene expression with clinical parameters, they would uncover a molecular classification scheme for CC-RCC and thus enhance the understanding of progression of this disease. In summary, the objectives were (1) to identify common features of renal cell tumorigenesis, specifically, genes that were regularly up- or down regulated; (2) to generate a molecular portrait of clinically heterogeneous CC-RCC; (3) to identify specific molecular signatures of CC-RCC associated with a particular clinical subset of tumors; and finally, (4) to assess the clinical utility of a particular set of genes as a prognostic tool.

[0054] Beyond prognosis and defining new sub-types of disease, the discovery of a set of differentially expressed genes provides a basis for explaining the differences in aggressiveness and clinical outcome. Because genes that best discriminate two phenotypes are expected to be factors in that difference, the clinical follow-up data described herein allows investigation of genes with expression profiles unique to a particular clinical subtype.

[0055] Finally, use of the methods and compositions described herein permit identification of (A) proteins whose detection provide an early diagnostic approach to CC-RCC proteins as well (3) drug targets as the products of genes (i) whose expression is commonly altered in CC-RCC or (ii) whose activity is altered in a disease phenotype-selective manner. Thus, by discovering that a particular gene is differentially regulated in aggressive CC-RCC, one can focus on developing drugs that (1) correct down regulation or suppress up-regulation, for example by acting on cellular pathways that stimulate expression of this gene, (2) act directly on the protein product, or (c) bypass the step in a cellular pathway mediated by the product of this gene.

[0056] The present inventors have discovered a set of expressed nucleic acid markers through statistical clustering analysis, whose differential expression is indicative of heterogeneous CC-RCC disease manifestation.

[0057] The present invention provides a nucleic acid probe or a set of probes (preferably between 2 and 217 in number) and a microarray comprising these DNA markers as probes for the gene expression levels that are characteristic of CC-RCC tumor tissue compared to normal tissue from the same kidney. In one embodiment, the presence and levels of mRNA in a tissue being analyzed are screened using methods known in the art (i.e., Southern/Northern/Western blotting, gel electrophoresis, RFLP, SSCP). The invention is further directed to a method of implementing the microarray technology for disease prognosis (aggressive vs. non-aggressive CC-RCC) thereby supplementing currently available prognostic techniques (radiologic imaging) and pathological classification.

[0058] Use of the accurate, objective molecular methods described herein will inform physicians about which patients require heightened observation and additional, e.g., adjuvant, therapies—for example patients presenting with low stage CC-RCCs that appear on their face to be non-aggressive by conventional criteria, but that have the aggressive type molecular signatures as described herein. Moreover, in the case of patients presenting with higher stage CC-RCCs that might mistakenly be diagnosed as aggressive, but which have the non-aggressive molecular signature, this invention facilitates withholding of unnecessarily aggressive treatment while maintaining appropriate vigilance.

[0059] Thus, the present invention is directed to a prognostic microarray composition of at least one oligonucleotide or polynucleotide probe from a set of probes immobilized to a solid surface in a predetermined order such that a row of pixels corresponds to replicates of one distinct probe from the set. The probes are complementary to nucleic acid sequences expressed differentially in aggressive as compared to non-aggressive types of CC-RCC. The probes are preferably any of SEQ ID NO:1-SEQ ID NO:39 inclusive, SEQ ID NO:139 or SEQ ID NO:332-SEQ ID NO:497, inclusive. The nucleic acid sequences hybridize to the probes under high stringency conditions.

[0060] The microarray may comprise at least about 10 probes, or in another embodiment, at least about 39 or even at least about 206 probes, which probes are complementary to nucleic acid sequences expressed differentially in aggressive as compared to non-aggressive types of CC-RCC. These probes are preferably at least about 15 nucleotides in length.

[0061] The microarray of the present invention can be used to assay expressed nucleic acid samples (representing genes differentially expressed in normal kidney versus CC-RCC tumor tissue) for one or more individual subject's tumor or normal tissue, wherein each sample from an individual subject's tumor or normal tissue is spotted column-wise on the pixels of the microarray probes. The microarray can comprise at least 10, or, in another embodiment, at least about 99, or at least about 291 probes.

[0062] In one embodiment, the composition comprises the microarray to which are hybridized and thus immobilized, expressed nucleic acids from the subject. Preferably, hybridization is performed under stringent conditions.

[0063] The above microarray probes can comprise nucleotides having at least one modified phosphate backbone, e.g., phosphorothioate, a phosphoridothioate, a phosphoramidothioate, a phosphoramidate, a phosphordiimidate, a methylsphosphonate, an alkyl phosphotriester, 3′-aminopropyl, a formacetal, or analogues thereof.

[0064] Also provided is a composition comprising a set of two or more oligonucleotide or polynucleotide probes, each of which hybridizes with part or all of a coding sequence that is differentially expressed in aggressive type CC-RCC compared to non-aggressive type CC-RCC. The above set of probes can comprise at least about 10 probes, or, in another embodiment, at least about 39 probes, or even at least about 206 probes.

[0065] The differentially expressed nucleic acid sequences detected by the probes may be ones that are up-regulated or down-regulation in one form of CC-RCC compared to normal tissue or compared to the other form of CC-RCC (aggressive vs. non-aggressive).

[0066] The above probes are typically of mammalian, preferably human, origin.

[0067] Also provided is a method of predicting whether a subject with a CC-RCC has non-aggressive or aggressive-type CC-RCC. In this method, the expression of nucleic acids from the subject's normal kidney tissue versus kidney tumor tissue is compared in its hybridization, preferably at high stringency conditions, with one or more oligonucleotide or polynucleotide probes as above, preferably probes selected from those having the sequence SEQ ID NO:1-SEQ ID NO:21 or SEQ ID NO:22-SEQ ID NO:39.

[0068] In one embodiment using probes of the sequence SEQ ID NO:1-SEQ ID NO:21, up-regulation of at least 2-fold, preferably 3-fold, more preferably 4-fold, in tumor tissue is indicative of non-aggressive CC-RCC.

[0069] In another embodiment using probes of the sequence SEQ ID NO:22-SEQ ID NO:39, down-regulation of at least 2-fold, preferably 3-fold, more preferably 4-fold, in tumor tissue is indicative of aggressive CC-RCC.

[0070] In the above methods, the nucleic acids from the tumor and the tissue are detectably labeled, preferably with a fluorescent label prior to the hybridization. With fluorescent labels, hybridization is detected as a fluorescent signal bound to the probe.

[0071] In one embodiment of the above method, the probes are immobilized to a solid surface of a microarray as pixels arranged in rows, and the expressed nucleic acids from the tumor tissue or normal tissue samples are spotted column-wise onto the probe pixels.

[0072] Also provided is a method for the early diagnosis of a CC-RCC tumor in a subject prior to physical or radiological evidence of the tumor. In this method a protein product of at least one gene is selected based on its expression being up-regulated in a majority of CC-RCC patients. This protein product is preferably a secreted protein or a cell surface protein expressed in tissue readily accessible for assay. The presence or quantity of the protein product in a body fluid or a tissue or cell sample from the subject is determined. An increased level of the protein product compared to the level in a normal subject's fluid, tissue or cells (or another reference normal value) is indicative of the presence of a CC-RCC tumor in the subject.

[0073] This invention also provides is a method for diagnosing the recurrence of a CC-RCC tumor in a subject in whom a CC-RCC primary tumor has been excised or otherwise treated. In this method a protein product of at least one gene is selected based on its expression being up-regulated in a majority of CC-RCC patients. This protein product is preferably a secreted protein or a cell surface protein expressed in tissue readily accessible for assay. The presence or quantity of the protein product protein product in a body fluid or a tissue or cell sample from the subject is determined. An increase in the level of the protein product compared to the level in a normal subject's fluid, tissue or cells (or another reference normal value) is indicative of the presence of a recurrent CC-RCC tumor in the subject.

[0074] In both methods of early diagnosis and diagnosis of recurrence, the gene is preferably one that hybridizes with any one or more of SEQ ID NO:40-SEQ ID NO:68 or SEQ ID NO:140-SEQ ID NO:230, more preferably with one or more of SEQ ID NO:40-SEQ ID NO:68.

[0075] The invention also provides a kit comprising a microarray, reagents that facilitate hybridization of differentially expressed nucleic acid to the immobilized probes on the microarray, and a computer readable storage medium comprising logic which enables a processor to read data representing detection of hybridization. These kits are useful for the diagnosis of aggressive or non-aggressive CC-RCC.

[0076] In one embodiment of the provided kit, the reagents facilitate detection of fluorescence as the means for determining hybridization.

[0077] Also included is a kit comprising (a) the microarray or composition of any of claims 1-22; (b) means for carrying out hybridization of the nucleic acid to the probes; and (c) means for reading hybridization data. The hybridization data is preferably in the form of fluorescence data. The probes are preferably immobilized to the microarray.

### BRIEF DESCRIPTION OF THE DRAWINGS

[0078] FIG. 1 shows an unsupervised two-way clustering matrix for all 3,184 genes tested. Colored bars on the right represent nodes with high predictive scores. Patient groups appear at the top coded in red, blue or black: Red—poor outcomes; Blue—good outcome; Black—short follow-up period.

[0079] FIGS. 2A and 2B show a supervised two-way re-clustering matrix (FIG. 2A) of independent ‘predictive’ node 1281, and its respective dendrogram (FIG. 2B) displaying the similarity of patient samples based on a specific subsets of genes. Color code for patients as for FIG. 1. The colors appearing in the multicolor bar beneath the dendrogram appearing at the very bottom of FIG. 2B represent the average expression values for the subsets of genes for each patient.

[0080] FIGS. 3A and 3B show a supervised two-way re-clustering matrix (FIG. 3A) of independent ‘predictive’ node 3014, and its respective dendrogram (FIG. 3B) displaying the similarity of patient samples based on a specific subsets of genes. Color code for patients as for FIG. 1. The colors appearing in the multicolor bar beneath the dendrogram appearing at the very bottom of FIG. 3B represent the average expression values for the subsets of genes for each patient.

[0081] FIGS. 4A and 4B show a supervised two-way re-clustering matrix (FIG. 4A) of independent ‘predictive’ node 2199, and its respective dendrogram (FIG. 4B) displaying the similarity of patient samples based on a specific subsets of genes. Color code for patients as for FIG. 1. The colors appearing in the multicolor bar beneath the dendrogram appearing at the very bottom of FIG. 4B represent the average expression values for the subsets of genes for each patient.

[0082] FIG. 5 shows an expression matrix of a prognostic set of 51 genes (node 1281 from FIGS. 2A and 2B). Median centering of genes was not performed so that each square corresponds to the actual normalized gene expression level relative to normal tissue. The red bar labeled “A” marks genes mostly up regulated in low-risk, non-aggressive tumors. The green bar “B” marks genes mostly down regulated in high-risk, aggressive tumors.

[0083] FIG. 6 is shows clustering expression matrices of subsets of genes the expression of which was detected in 29 CC-RCC tumors. Rows represent individual polynucleotide probes (cDNAs or ESTs) immobilized to the slides; columns represent individual patient tumor samples (as fluorescently labeled cDNAs). Each square's color corresponds to the median-polished, normalized DNA expression value for a single gene in a single tumor relative to patient-matched normal renal tissue. Gene expression is either depicted in RED (above median), GREEN (below median), BLACK (equal to median) or GRAY (inadequate or missing data). The color saturation indicates the extent of divergence from the median. FIGS. 6A and 6B show supervised two-way re-clustering matrices of three independent ‘predictive’ nodes (reproduced as enlarged views in FIGS. 2A, 3A, and 4A). FIG. 6C shows the respective dendrograms displaying the similarity of patient samples based on specific subsets of genes (reproduced as enlarged views in FIGS. 2B, 3B, and 4B). Color code for patients: Red—poor outcomes; Blue—good outcome; Black—short follow-up period. The colors appearing in the multicolor bar beneath each dendrogram (FIG. 6C) represent the average expression values for the subsets of genes for each patient.

### DESCRIPTION OF THE PREFERRED EMBODIMENTS

[0084] In the present application, the terms “nucleic acid” and “polynucleotide” are used interchangeably and refer to both DNA and RNA (as well as peptide nucleic acids). The term “oligonucleotide” is not intended to be limited to a particular number of nucleotides and therefor overlaps with polynucleotide. Probes for gene expression analysis include those comprising ribonucleotides, deoxyribonucleotides, both or their analogues as described below. They may be poly- or oligonucleotides, without limitation of length. Preferred lengths are described below.

[0085] The present invention uses cDNA microarrays to probe for, and to determine the relative expression of, target genes of interest in a tissue sample of CC-RCC.

[0086] Microarrays are orderly arrangements of spatially resolved samples or probes (in the present invention cDNAs of known sequence ranging in size from 200 to 2000 nucleotides), that allow for massively parallel gene expression and gene discovery studies (Lockhart D J et al., Nature (2000) 405(6788):827-836). The probes are immobilized to a solid substrate and made available to hybridize with their complementary strands as is described in the preferred embodiments (Phimister, Nature Genetics (1999) 21(supp):1-60).

[0087] The underlying concept of the microarray depends on base-pairing (hybridization) between purine and pyrimidine bases following the rules of Watson-Crick base pairing. Microarray technology adds automation to the process of resolving nucleic acids of particular identity and sequence present in an analyte sample by labeling, preferably with fluorescent labels, and subsequent hybridization to their complements immobilized to a solid support in microarray format. Array experiments employ common solid supports such as glass slides, microplates or standard blotting membranes, and can be created by hand or by robotic deposition of samples. Arrays are generally described as macroarrays or microarrays. Macroarrays contain sample spots of about 300 μm diameter or larger and can be easily imaged by existing gel and blot scanners. Sample spot sizes in microarrays are typically <200 μm in diameter, and these arrays usually contains thousands of spots. Microarrays require specialized robotics and imaging equipment that generally are commercially available and well-known in the art. However, the materials for a particular application are not necessarily available in convenient in kit form. The present invention provides microarrays useful for analysis and prognosis of CC-RCC samples.

[0088] DNA microarrays (DNA “chips”) are fabricated by high-speed robotics, preferably on glass (though nylon and other plastic substrates are used). An experiment with a single DNA chip can provide simultaneous information on thousands of genes—a dramatic increase in throughput (Reichert et al. (2000) Anal. Chen.72:6025-6029) when compared to traditional methods.

[0089] Two DNA microarray formats are preferred.
[0090] Format I: a cDNA probe (500˜5,000 bases) is immobilized to a solid surface such as glass using robotic spotting and exposed to a set of targets either separately or in a mixture. This method, traditionally called “DNA microarray,” is considered to have been developed at Stanford University (Ekins, R et al., Trends in Biotech (1999) 17:217-218).
[0091] Format II: an array of probes that are “natural” oligo- or polynucleotides (oligomers of 20˜80 bases), oligonucleotide analogues e.g., with phosphorothioate, methylphosphonate, phosphoramidate, or 3′-aminopropyl backbones), or peptide-nucleic acids (PNA) Probes may be synthesized either in situ (on-chip) or by conventional synthesis followed by on-chip immobilization.

[0092] The array is (1) exposed to an analyte comprising a detectable labeled, preferably fluorescent, sample nucleic acid (typically DNA), (2) allowed to hybridize, and (3) the identity and/or abundance of complementary sequences is determined.

| 1. Probe (cDNA or | 2. Chip | 3. Target | | |
|---|---|---|---|---|
| oligonucleotide of | fabrication (putting | (detectably labeled | | |
| known identity) | probes on the chip) | sample) | 4. Assay | 5. Readout |
| Small oligos, cDNA, | Photolithography, | PolyA-mRNA | Hybridization, long, | Fluorescence, |
| chromosome | pipette, drop-touch, | extraction, RT-PCR, | short, ligase, base | radioactivity, |
| | piezoelectric (ink- | cDNA isolation, | addition, electric, MS, | etc. |
| | jet), electric | melting | electrophoresis, flow | |
| | | | cytometry, PCR-Direct, | |
| | | | TaqMan ®, etc. | |

[0093] For analysis of the target nucleic acid of primary tumor tissue, the preferred analyte of this invention is isolated from tissue biopsies before they are stored or from fresh-frozen tumor tissue of the primary tumor which may be stored and/or cultured in standard culture media. For expression studies, poly(A)-containing mRNA is isolated using commercially available kits, e.g., from Invitrogen, Oligotex, or Qiagen. The isolated mRNA is reverse transcribed into cDNA in the presence of a labeled nucleotides. Fluorescent cDNA is generally synthesized using reverse transcriptase (e.g., Superscript II reverse-transcription kit from GIBCO-BRL) and nucleotides to 20 which is conjugated a fluorescent label. A preferred fluorescent label is Cy5 conjugated to dUTP and/or dCTP (from Amersham).

[0094] The present invention utilizes immobilized cDNA probes of anywhere between about 15 bases up to a full length cDNA, e.g., about 2000 bases. Preferred probes have about 100 bases. Optimal hybridization conditions (i.e., temperature, pH, ion and salt concentrations, and incubation time) are dependent on the length of the shortest probes as the limiting step and can be adjusted in a continuous fashion by varying the above parameters as is conventional in the art.

[0095] Several probe sequences described herein are cDNAs complementary to genes or gene fragments; some are ESTs. Those skilled in the art will appreciate that the probe of choice for a particular gene can be the full length coding sequence or any fragment thereof having at least about 15 nucleotides. Thus, when the full length sequence is known, the practitioner can select any appropriate fragment of that sequence. When the original results are obtained using partial sequence information (e.g., an EST probe), and when the full length sequence of which that EST is a fragment becomes available (e.g., in a genome database), the skilled artisan can select a longer fragment than the initial EST, as long as the length is at least about 15 nucleotides.

[0096] The present invention includes microarrays comprising one or more nucleic acid probes having hybridizable fragments of any length (from about 15 bases to full coding sequence) for the genes whose expression is to be analyzed. For purposes of the analysis, the full length sequence must not necessarily be known, as those of skill in the art will know how to obtain the fall length sequences using the sequence of a given EST and known data mining, bioinformatic, and DNA sequencing methodologies without undue experimentation.

[0097] The polynucleotide or oligonucleotide probes of the present invention may be native DNA or RNA molecules or an analogues of DNA or RNA. The present invention is not limited to the use of any particular DNA or RNA analogue; rather any one is useful provided that it is capable of adequate hybridization to the complementary DNA (or mRNA) in a test sample, has adequate resistance to nucleases and stability in the hybridization protocols employed. DNA or RNA may be made more resistant to nuclease degradation in vivo by modifying internucleoside linkages (e.g., methylphosphonates or phosphorothioates) or by incorporating modified nucleosides (e.g., 2′-0-methylribose or 1′-α-anomers) as described below.

[0098] A poly- or oligonucleotide may comprise at least one modified base moiety, for example, 5-fluorouracil, 5-bromouracil, 5-chlorouracil, 5-iodouracil, hypoxanthine, xanthine, 4-acetylcytosine, 5-(carboxyhydroxyhnethyl)uracil, 5-carboxymethylaminomethyl-ω-thiouridine, 5-carboxymethyl-aminomethyl uracil, dihydrouracil, β-D-galactosylqueosine, inosine, N6-isopentenyladenine, 1-methylguanine, 3-methyl-cytosine, 5-methylcytosine, N6-adenine, 7-methylguanine, 5-methylaminomethyluracil, 5-methoxyamino-methyl-2-thiouracil, β-D-mannosylqueosine, 5-methoxy-carboxymethyluracil, 5-methoxyuracil-2-methylthio-N6-iso-pentenyladenine, uracil-5-oxyacetic acid, butoxosine, pseudouracil, queuosine, 2-thio-cytosine, 5-methyl-2-thiouracil, 2-thiouracil, 4-thiouracil, 5-methyluracil, uracil-5-oxyacetic acid methylester, uracil-t-oxyacetic acid, 5-methyl-2-thiouracil, 3(3-amino-3-N-2-carboxypropyl) uracil and 2,6-diaminopurine.

[0099] The poly- or oligonucleotide may comprise at least one modified sugar moiety including, but not limited, to arabinose, 2-fluoroarabinose, xylulose, and hexose.

[0100] In yet another embodiment, the poly- or oligonucleotide probe comprises a modified phosphate backbone synthesized from a nucleotide having, for example, one of the following structures: a phosphorothioate, a phosphoridothioate, a phosphoramidothioate, a phosphoramidate, a phosphordiimidate, a methylsphosphonate, an alkyl phosphotriester, 3′-aminopropyl and a formacetal or analog thereof.

[0101] In yet another embodiment, the poly- or oligonucleotide probe is an α-anomeric oligonucleotide which forms specific double-stranded hybrids with complementary RNA in which, contrary to the usual β-units, the strands run parallel to each other (Gautier et al., 1987, Nucl. Acids Res. 15:6625-6641).

[0102] An oligonucleotide may be conjugated to another molecule, e.g., a peptide, a hybridization triggered cross-linking agent, a hybridization-triggered cleavage agent, etc., all of which are well-known in the art.

[0103] Oligonucleotides of this invention may be synthesized by standard methods known in the art, e.g. by use of an automated DNA synthesizer (such as are commercially available from Biosearch, Applied Biosystems, etc.). As examples, phosphorothioate oligonucleotides may be synthesized by the method of Stein et al., (Nucl. Acids Res. (1998) 16:3209, methylphosphonate oligonucleotides can be prepared by use of controlled pore glass polymer supports (Sarin et al., Proc. Natl. Acad. Sci. U.S.A. (1988) 85:7448-7451), etc.

[0104] Detectable Labels for Oligo- or Polynucleotide Probes

[0105] Preferred detectable labels include a radionuclides, fluorescers, fluorogens, a chromophore, a chromogen, a phosphorescer, a chemiluminescer or a bioluminescer. Examples of fluorescers or fluorogens are i fluorescein, rhodamine, dansyl, phycoerythrin, phycocyanin, allophycocyanin, o-phthaldehyde, fluorescamine, a fluorescein derivative, Oregon Green, Rhodamine Green, Rhodol Green or Texas Red.

[0106] Common fluorescent labels include fluorescein, rhodamine, dansyl, phycoerythrin, phycocyanin, allophycocyanin, o-phthaldehyde and fluorescamine. Most preferred are the labels described in the Examples, below.

[0107] The fluorophore must be excited by light of a particular wavelength to fluoresce. See, for example, Haugland, Handbook of Fluorescent Probes and Research Chemicals, Sixth Ed., Molecular Probes, Eugene, Oreg., 1996).

[0108] Fluorescein, fluorescein derivatives and fluorescein-like molecules such as Oregon Green™ and its derivatives, Rhodamine Green™ and Rhodol Green™, are coupled to amine groups using the isothiocyanate, succinimidyl ester or dichlorotriazinyl-reactive groups. Similarly, fluorophores may also be coupled to thiols using maleimide, iodoacetamide, and aziridine-reactive groups. The long wavelength rhodamines, which are basically Rhodamine Green™ derivatives with substituents on the nitrogens, are among the most photostable fluorescent labeling reagents known. Their spectra are not affected by changes in pH between 4 and 10, an important advantage over the fluoresceins for many biological applications. This group includes the tetramethylrhodamines, X-rhodamines and Texas Red™ derivatives. Other preferred fluorophores are those which are excited by ultraviolet light. Examples include cascade blue, coumarin derivatives, naphthalenes (of which dansyl chloride is a member), pyrenes and pyridyloxazole derivatives.

[0109] The present invention serves as a basis for even broader implementation of microarrays and gene expression in deducing critical pathways implicated in cancer. In the case of CC-RCC, which is the focus of the present invention, a database of known patient genetic profiles can be used to categorize each new CC-RCC patient. The gene expression profile of the newly diagnosed CC-RCC patient is compared to the known CC-RCC molecular database of patients, such as that described herein based on 29 patients in whom complete clinical follow-up information is available. This database will grow with each patient who is subjected to the present analysis as soon as his clinical outcome information becomes available. If the newly diagnosed patient's gene expression profile most closely resembles the profile of aggressive CC-RCC, as described herein, that patient will be so classified and treated accordingly, i.e., with more aggressive measures. Correspondingly, if a newly diagnosed patient's profile is that of the non-aggressive type, he will be treated accordingly, e.g., with less aggressive measures and careful clinical follow-up.

[0110] Considering the low response rates of CC-RCC patients to current therapies such as with interferon-α and interleukin-2 infusion, the report that the apoptosis following induction of TIMP3 (Ahonen, et al. (1998) Cancer Res 58:2310-2315) coupled with the discovery here that TIMP3 is down-regulated in aggressive CC-RCC points to a new potential therapeutic strategy that may include gene therapy. The present approach permits the identification of one or more appropriate targets for such therapy.

Drug Discovery Based on Gene Expression Profiling

[0111] The molecular profiling information described herein is also harnessed for the purpose of discovering drugs that are selected for their ability to correct or bypass the molecular alterations or derangements that are characteristic of CC-RCC, particularly those that are associated with its aggressive form. A number of approaches are available.

[0112] In one embodiment, CC-RCC cell lines are prepared from tumors using standard methods and are profiled using the present methods. Preferred cell lines are those that maintain the expression profile of the primary tumor from which they were derived. One or several CC-RCC cells lines may be used as a “general” panel; alternatively or additionally, cell lines from individual patients may be prepared and used. These cell lines are used to screen compounds, preferably by high-throughput screening (HTS) methods, for their ability to alter the expression of selected genes. Typically, small molecule libraries available from various commercial sources are tested by HTS protocols.

[0113] The molecular alterations in the cell line cells can be measured at the mRNA level (gene expression) applying the methods disclosed in detail herein. Alternatively, one may assay the protein product(s) of the selected gene(s). Thus, in the case of secreted or cell-surface proteins, expression can be assessed using immunoassay or other immunological methods including enzyme immunoassays (EIA), radioimmunoassay (RIA), immunofluorescence microscopy or flow cytometry. EIAs are described in greater detail in several references (Butler, J E, In: Structure of Antigens, Vol. 1 (Van Regenmortel, M., CRC Press, Boca Raton 1992, pp. 209-259; Butler, J E, “ELISA,” In: van Oss, C. J. et al. (eds), Immunochemistry, Marcel Dekker, Inc., New York, 1994, pp. 759-803; Butler, J E (ed.), Inmmunochemistry of Solid-Phase Immunoassay, CRC Press, Boca Raton, 1991). RIAs are discussed in Kirkdam and Hunter (eds.), Radioimmune Assay Methods, E. & S. Livingstone, Edinburgh, 1970.

[0114] In another approach, antisense RNAs or DNAs that specifically inhibit the transcription and/or translation of the targeted genes can be screened for specificity and efficacy using the present methods. Antisense compositions would be particularly useful for treating tumors in which a particular gene is up-regulated (e.g., the genes in Tables 2 and 3).

Diagnostic Methods

[0115] The protein products of genes that are upregulated in most cases of CC-RCC (e.g. Tables 2 and 3) are targets for early diagnostic assays of CC-RCC if the proteins can be detected by some assay means, e.g., immunoassay, in some accessible body fluid or tissue. The most useful diagnostic targets are secreted proteins which reach a measurable level in a body fluid before the tumor presents by other criteria discussed in the Background section. Thus, a sample of a body fluid such as such as plasma, serum, urine, saliva, cerebrospinal fluid, etc., is obtained from the subject being screened. The sample is subject to any known assay for the protein analyte. Alternatively, cells expressing the protein on their surface may be obtained, e.g., blood cells, by simple, conventional means. If the protein is a receptor or other cell surface structure, it can be detected and quantified by well-known methods such as flow cytometry, immunofluorescence, immunocytochemistry or immunohistochemistry, and the like.

[0116] Preferably, an antibody or other protein or peptide ligand for the target protein to be detected is used. In another embodiment where the gene product is a receptor, a peptidic or small molecule ligand for the receptor may be used in known assays as the basis for detection and quantitation.

[0117] In vivo methods with appropriately labeled binding partners for the protein targets, preferably antibodies, may also be used for diagnosis and prognosis, for example to image occult metastatic foci or for other types of in situ evaluations. These methods utilize include various radiographic, scintigraphic and other imaging methods well-known in the art (MRI, PET, etc.).

[0118] Suitable detectable labels include radioactive, fluorescent, fluorogenic, chromogenic, or other chemical labels. Useful radiolabels, which are detected simply by gamma counter, scintillation counter or autoradiography include ³H, ¹²⁵I, ¹³¹I, ³⁵S and ¹⁴C.

[0119] Common fluorescent labels include fluorescein, rhodamine, dansyl, phycoerythrin, phycocyanin, allophycocyanin, o-phthaldehyde and fluorescamine. The fluorophore, such as the dansyl group, must be excited by light of a particular wavelength to fluoresce. See, Haugland, Handbook of Fluorescent Probes and Research Chemicals, Sixth Ed., Molecular Probes, Eugene, Oreg., 1996). Fluorescein, fluorescein derivatives and fluorescein-like molecules such as Oregon Green™ and its derivatives, Rhodamine Green™ and Rhodol Green™, are coupled to amine groups using the isothiocyanate, succinimidyl ester or dichlorotriazinyl-reactive groups. Fluorophores may also be coupled to thiols using maleimide, iodoacetamide, and aziridine-reactive groups. The long wavelength rhodamines include the tetramethylrhodamines, X-rhodamines and Texas Red™ derivatives. Other preferred fluorophores for derivatizing the protein binding partner are those which are excited by ultraviolet light. Examples include cascade blue, coumarin derivatives, naphthalenes (of which dansyl chloride is a member), pyrenes and pyridyloxazole derivatives.

[0120] The protein (antibody or other ligand) can also be labeled for detection using fluorescence-emitting metals such as ¹⁵²Eu, or others of the lanthanide series. These metals can be attached to the protein using metal chelating groups such as diethylenetriaminepentaacetic acid (DTPA) or ethylenediaminetetraacetic acid (EDTA).

[0121] For in vivo diagnosis, radionuclides may be bound to protein either directly or indirectly using a chelating agent such as DTPA and EDTA which is chemically conjugated, coupled or bound (which terms are used interchangeably) to the protein. The chemistry of chelation is well known in the art. The key limiting factor on the chemistry of coupling is that the antibody or ligand must retain its ability to bind the target protein. A number of references disclose methods and compositions for complexing metals to macromolecules including description of useful chelating agents. The metals are preferably detectable metal atoms, including radionuclides, and are complexed to proteins and other molecules. See, for example, U.S. Pat. No. 5,627,286, U.S. Pat. No. 5,618,513, U.S. Pat. No. 5,567,408, U.S. Pat. No. 5,443,816, U.S. Pat. No. 5,561,220, all of which are incorporated by reference herein.

[0122] Any radionuclide having diagnostic (or therapeutic value) can be used. In a preferred embodiment, the radionuclide is a y -emitting or P-emitting radionuclide, for example, one selected from the lanthanide or actinide series of the elements. Positron-emitting radionuclides, e.g. ⁶⁸Ga or ⁶⁴Cu, may also be used. Suitable γ-emitting radionuclides include those which are useful in diagnostic imaging applications. The gamma -emitting radionuclides preferably have a half-life of from 1 hour to 40 days, preferably from 12 hours to 3 days. Examples of suitable y-emitting radionuclides include ⁶⁷Ga, ¹¹¹In, ^{99m}Tc, ¹⁶⁹Yb and ¹⁸Re. Examples of preferred radionuclides (ordered by atomic number) are ⁶⁷Cu, ⁶⁷Ga, ⁶⁸Ga, ⁷²As, ⁸⁹Zr, ⁹⁰Y, ⁹⁷Ru, ⁹⁹Tc, ¹¹¹In, ¹²³I, ¹²⁵I, ¹³¹I, ¹⁶⁹Yb, ¹⁸⁶Re, and ²⁰¹Tl. Though limited work have been done with positron-emitting radiometals as labels, certain proteins, such as transferrin and human serum albumin, have been labeled with ⁶⁸Ga,

[0123] A number of metals (not radioisotopes) useful for MRI include gadolinium, manganese, copper, iron, gold and europium. Gadolinium is most preferred. Dosage can vary from 0.01 mg/kg to 100 mg/kg.

[0124] In situ detection of the labeled protein may be accomplished by removing a histological specimen from a subject and examining it by microscopy under appropriate conditions to detect the label. Those of ordinary skill will readily perceive that any of a wide variety of histological methods (such as staining procedures) can be modified in order to achieve such in situ detection.

[0125] The compositions of the present invention may be used in diagnostic, prognostic or research procedures in conjunction with any appropriate cell, tissue, organ or biological sample of the desired animal species. By the term “biological sample” is intended any fluid or other material derived from the body of a normal or diseased subject, such as blood, serum, plasma, lymph, urine, saliva, tears, cerebrospinal fluid, milk, amniotic fluid, bile, ascites fluid, pus and the like. Also included within the meaning of this term is a organ or tissue extract and a culture fluid in which any cells or tissue preparation from the subject has been incubated.

[0126] An alternative diagnostic approach utilizes cDNA probes that are complementary to and thereby detect cells in which a gene associated with CC-RCC is upregulated by in situ hybridization with mRNA in these cells. The present invention provides methods for localizing target mRNA in cells using fluorescent in situ hybridization (FISH) with labeled cDNA probes having a sequence that hybridizes with the mRNA of an upregulated gene. The basic principle of FISH is that DNA or RNA in the prepared specimens are hybridized with the probe nucleic acid that is labeled non-isotopically with, for example, a fluorescent dye, biotin or digoxigenin. The hybridized signals are then detected by fluorimetric or by enzymatic methods, for example, by using a fluorescence or light microscope. The detected signal and image can be recorded on light sensitive film.

[0127] An advantage of using a fluorescent probe is that the hybridized image can be readily analyzed using a powerful confocal microscope or an appropriate image analysis system with a charge-coupled device (CCD) camera As compared with radioactive methods, FISH offers increased sensitivity. In additional to offering positional information, FISH allows better observation of cell or tissue morphology. Because of the nonradioactive approach, FISH has become widely used for localization of specific DNA or mRNA in a specific cell or tissue type.

[0128] The in situ hybridization methods and the preparations useful herein are describe in Wu, W. et al., eds., Methods in Gene Biotechnology, CRC Press, 1997, chapter 13, pages 279-289. This book is incorporated by reference in its entirety, as are the references cited therein. A number of patents and papers that describe various in situ hybridization techniques and applications, also incorporated by reference, are: U.S. Pat. Nos. 5,912,165; 5,906,919; 5,885,531; 5,880,473; 5,871,932; 5,856,097; 5,837,443; 5,817,462; 5,784,162; 5,783,387; 5,750,340; 5,759,781; 5,707,797; 5,677,130; 5,665,540; 5,571,673; 5,565,322; 5,545,524; 5,538,869; and 5,501,954, 5,225,326, 4,888,278. Other related references include Jowett, T, Methods Cell Biol;59:63-85 (1999) Pinkel et al., Cold Spring Harbor Symp. Quant. Biol. LI:151-157 (1986); Pinkel, D. et al., Proc. Natl. Acad. Sci. (USA) 83:2934-2938 (1986); Gibson et al., Nucl. Acids Res. 15:6455-6467 (1987); Urdea et al., Nucl. Acids Res. 16:4937-4956 (1988); Cook et al., Nucl. Acids Res. 16:4077-4095 (1988); Telser et al., J. Am. Chem. Soc. 111:6966-6976 (1989); Allen et al., Biochemistry 28:4601-4607 (1989); Nederlof, P. M. et al., Cytometry 10:20-27 (1989); Nederlof, P. M. et al., Cytometry 11:126-131 (1990); Seibl, R., et al., Biol. Chem. Hoppe-Seyler 371:939-951 (October 1990); Wiegant, J. et al., Nucl. Acids Res. 19:3237-3241 (1991); McNeil J A et al., Genet Anal Tech Appl 8:41-58 (1991); Komminoth et al., Diagnostic Molecular Biology 1:85-87 (1992); Dauwerse, J G et al., Hum. Mol. Genet. 1:593-598 (1992); Ried, T. et al., Proc. Natl. Acad. Sci. (USA) 89:1388-1392 (1992); Wiegant, J. et al., Cytogenet. Cell Genet. 63:73-76 (1993); Glaser, V., Genetic. Eng. News. 16:1, 26 (1996); Speicher, M R, Nature Genet. 12:368-375 (1996).

[0129] Detection of “Unknown” Gene Product

[0130] In an extreme case, in which an upregulated DNA “X” is identified but its protein product “Y” is unknown, one would first examine the expressed DNA X sequence. The full length gene sequence may be obtained by accessing a human genomic database such as that of Celera. In either case, examination of the coding sequence for appropriate motifs will indicate whether the encoded protein Y is secreted protein or a transmembrane protein. If no antibodies specific for protein Y are already available, the peptides of protein Y can be designed and synthesized using known principles of protein chemistry and immunology. The object is to create a set of immunogenic peptides that elicit antibodies specific for epitopes of the protein that reside on its surface. Alternatively, the coding DNA or portions thereof can be expression-cloned to produce a polypeptide or peptide epitope thereof. That protein or peptide can be used as an immunogen to immunize animals for the production of antisera or to prepare monoclonal antibodies (mAbs). These polyclonal sera or mAbs can then be applied in an immunoassay, preferably an EIA, to detect the presence of protein Y or measure its concentration in a body fluid or cell/tissue sample.

Therapeutic Methods

[0131] Taking the lead from the drug discovery methods described above, one can exploit the present invention to treat CC-RCC based on the knowledge of the genes that are either up- or down-regulated in a highly predicable manner across CC-RCC cases (see Tables 2-5 in Examples). Based on the nature of the deduced protein product, one can devise a means to inhibit the action of, or remove an upregulated protein. In the case of a receptor, one would treat the upregulated receptor with an antagonist, a soluble receptor or a “decoy” ligand binding site of a receptor (Gershoni J M et al., Proc Natl Acad Sci USA, 988 85:4087-9; U.S. Pat. No. 5,770,572).

[0132] For an under-expressed receptor, an agonist or mimetic would be administered to maximize binding and activation of those receptor molecules which are expressed.

[0133] As for the set of genes that are shown here to be down-regulated in aggressive CC-RCC, one can devise a therapy targeted specifically at this form of the cancer, that would be used alone or in combination with known therapeutic approaches as discussed above. A preferred approach would be to stimulate production of the protein by administering an agent that promoted production, enhanced its stability or inhibited its degradation or metabolism. Alternatively, one could design means to bypass the metabolic step or signal pathway step that was affected by this down-regulation. This could by achieved by stimulating downstream steps in such pathways. If a receptor was involved, then, as above agonists or mimics could be used to heighten responses of cells expressing too little of the receptor.

[0134] Antibodies may be administered to a patient to bind and inactivate (or compete with) secreted protein products or expressed cell surface products of upregulated genes.

[0135] Moreover, for the down-regulated genes, gene therapy methods could be used to introduce more copies of the affected gene or more actively expressed genes operatively linked to strong promoters, e.g., inducible promoters, such as an estrogen inducible system (13raselmann, S. et al. Proc Natl Acad Sci USA (1993) 90:1657-1661). Also known are repressible systems driven by the conventional antibiotic, tetracycline (Gossen, M. et al., Proc. Natl. Acad. Sci. USA 89:5547-5551 (1992)).

[0136] In the case of upregulated genes, this approach would be extended to include antisense oligonucleotide or polynucleotide constructs that would inhibit gene expression in a highly specific manner. Multiple antisense constructs specific for different upregulated genes could be employed together. The sequences of the upregulated genes described herein are used to design the antisense oligonucleotides (Hambor, J E et al., J. Exp. Med. 168:1237-1245 (1988); Holt, J T et al., Proc. Nat'l. Acad. Sci. 83:4794-4798 (1986); Izant, J G et al., Cell 36:1007-1015 (1984); Izant, J G et al., Science 229:345-352 (1985); De Benedetti, A. et al., Proc. Natl. Acad. Sci. USA 84:658-662 (1987)). The antisense oligonucleotides may range from 6 to 50 nucleotides, and may be as large as 100 or 200 nucleotides. The oligonucleotides can be DNA or RNA or chimeric mixtures or derivatives or modified versions thereof, single-stranded or double-stranded. The oligonucleotides can be modified at the base moiety, sugar moiety, or phosphate backbone (as discussed above). The oligonucleotide may include other appending groups such as peptides, or agents facilitating transport across the cell membrane (see, e.g. Letsinger et al., 1989, Proc. Natl. Acad. Sci. USA 84:684-652; PCT Publication WO 88/09810, published December 15, 1988) or blood-brain barrier (e.g., PCT Publication No. WO 89/10134, published Apr. 25, 1988), hybridization-triggered cleavage agents (e.g. Krol et al., 1988, BioTechniques 6:958-976) or intercalating agents (e.g., Zon, 1988, Pharm. Res 5:539-549).

[0137] The therapeutic methods that require gene transfer and targeting may include virus-mediated gene transfer, for example, with retroviruses (Nabel, E. G. et al., Science 244:1342 (1989), lentiviruses, recombinant adenovirus vectors (Horowitz, M. S., In: Virology, Fields, B N et al., eds, Raven Press, New York, 1990, p. 1679, or current edition; Berkler, K L, Biotechniques 6:616 919,1988), Strauss, S E, In: The Adenoviruses, Ginsberg, H S, ed., Plenum Press, New York, 1984, or current edition), Adeno-associated virus (AAV) is also useful for human gene therapy (Samulski, R J et al., EMBO J. 10:3941 (1991); (Lebkowski, J S, et al., Mol. Cell. Biol. (1988) 8:3988-3996; Kotin, R M et al., Proc. Natl. Acad. Sci. USA (1990) 87:2211-2215); Hermonat, P L, et al., J. Virol. (1984)51:329-339). Improved efficiency is attained by the use of promoter enhancer elements in the plasmid DNA constructs (Philip, R. et al., J. Biol. Chenz. (1993) 268:16087-16090).

[0138] In addition to virus-mediated gene transfer in vivo, physical means well-known in the art can be used for direct gene transfer, including administration of plasmid DNA (Wolff et al., 1990, supra) and particle-bombardment mediated gene transfer, originally described in the transformation of plant tissue (Klein, T M et al., Nature 327:70 (1987); Christou, P. et al., Trends Biotechnol. 6:145 (1990)) but also applicable to mammalian tissues in vivo, ex vivo or in vitro (Yang, N.-S., et al., Proc. Natl. Acad. Sci. USA 87:9568 (1990); Williams, R S et al., Proc. Natl. Acad. Sci. USA 88:2726 (1991); Zelenin, A V et al., FEBS Lett. 280:94 (1991); Zelenin, A V et al., FEBS Lett. 244:65 (1989); Johnston, S. A. et al, In Vitro Cell. Dev. Biol. 27:11 (1991)). Furthermore, electroporation, a well-known means to transfer genes into cell in vitro, can be used to transfer DNA molecules according to the present invention to tissues in vivo (Titomirov, A V et al., Biochim. Biophys. Acta 1088:131 ((1991)).

[0139] Gene transfer can also be achieved using “carrier mediated gene transfer” (Wu, C H et al., J. Biol. Chem. 264:16985 (1989); Wu, G Y et al., J Biol. Chem. 263:14621 (1988); Soriano, P et al., Proc. Natl. Acad. Sci. USA 80:7128 (1983); Wang, C-Y. et al., Proc. Natl. Acad. Sci. USA 84:7851 (1982); Wilson, J. M. et al., J. Biol. Chem. 267:963 (1992)). Preferred carriers are targeted liposomes (Nicolau, C. et al., Proc: Natl. Acad. Sci. USA 80:1068 (1983); Soriano et al., supra) such as immunoliposomes, which can incorporate acylated monoclonal antibodies into the lipid bilayer (Wang et al., supra), or polycations such as asialoglycoprotein/polylysine (Wu et al., 1989, supra). Liposomes have been used to encapsulate and deliver a variety of materials to cells, including nucleic acids and viral particles (Faller, D V et al., J. Virol. (1984) 49:269-272).

[0140] Preformed liposomes that contain synthetic cationic lipids form stable complexes with polyanionic DNA (Felgner, P L, et al., Proc. Natl. Acad. Sci. USA (1987) 84:7413-7417). Cationic liposomes, liposomes comprising some cationic lipid, that contained a membrane fusion-promoting lipid dioctadecyldinethyl-ammonium-bromide (DDAB) have efficiently transferred heterologous genes into eukaryotic cells Rose, J K et al., Biotechniques (1991) 10:520-525). Cationic liposomes can mediate high level cellular expression of transgenes, or mRNA, by delivering them into a variety of cultured cell lines (Malone, R., et al., Proc. Natl. Acad. Sci. USA (1989) 86:6077-6081).

[0141] Having now generally described the invention, the same will be more readily understood through reference to the following examples which are provided by way of illustration, and are not intended to be limiting of the present invention, unless specified.

### EXAMPLE I

Patients and Tumor Samples

[0142] Tissue samples were from 29 CC-RCC patients at the University Hospital, School of Medicine, Tokushima University (Japan) who underwent radical nephrectomy. Informed consent was obtained for study of surgical specimens and clinico-pathological data. Samples were anonymized prior to the study. A part of each tumor sample was frozen in liquid nitrogen immediately following surgery and stored at −80° C.

[0143] Conventional methods were used for nucleic acid isolation and preparation. Total RNA was isolated using ISOGEN solution (Nippon Gene), and poly(A)+ RNA was isolated from total RNA using the Oligotex mRNA Mini Kit (Qiagen). Remaining tumor tissue was fixed in 10% buffered formalin, sectioned and stained with hematoxylin and eosin. The WHO International Histological Classification of Tumors was used for histological evaluation of the specimens (Sobin, L. H. et al., supra)(TNM classification described above) with standard follow up for 3.2 to 137.2 months (median 83.7 months). Clinico-pathological data are summarized in Table 1.

### EXAMPLE II

### Materials and Methods

Microarray Design

[0144] Microarrays were produced using conventional methods and materials well known in the art (Eisen et al., Methods Enzymol (1999) 303:179-205) with slight modifications. Bacterial libraries purchased from Research Genetics, Inc. were the source of 21,632 cDNAs which were PCR amplified 21,632 directly. cDNA clones were ethanol-precipitated and transferred to 384-well plates from which they were printed onto poly-l-lysine coated glass slides using a home-built robotic microarrayer (www.microarrays.org/ndfs/PrintingArrays). The boundaries of the array where then marked with a diamond scriber to discriminate the edges (diamond scriber available by catalogue, VWR #52865-005) since the array is mostly invisible after post-processing. The printed array was immersed into a humid chamber prepared with 100 ml 1×SSC and allowed to rehydrate on an inverted heat block of preferably, 70-80° C., block for about 3 seconds. The cDNA was UV crosslink to glass with Stratalinker set for about 65 mJ. (Preferably, set display to “650”, which is 650×100 μJ).

TABLE1
Patient clinical data and corresponding prognosis classifications

| | | | | | | Prognosis Group | |
|---|---|---|---|---|---|---|---|
| | | | | | Outcome | Pathology/ | Gene |
| patient | Grade | Stage | Outcome | Duration | Group | Staging | Expression |
| 46 | G1 | S1 | NED | 62.6 | L | L | L |
| 42 | G1 | S1 | NED | 77.3 | L | L | L |
| 41 | G1 | S1 | NED | 80.3 | L | L | L |
| 30 | G2 | S3 | NED | 87.1 | L | H* | H* |
| 7 | G1 | S1 | NED | 92.1 | L | L | L |
| 26 | G1 | S1 | NED | 96 | L | L | L |
| 24 | G1 | S1 | NED | 97.3 | L | L | L |
| 15 | G1 | S1 | OCD | 100.4 | L | L | L |
| 32 | G1 | S2 | OCD | 110.4 | L | L | L |
| 1 | G1 | S1 | NED | 111.6 | L | L | L |
| 21 | G1 | S1 | NED | 114.6 | L | L | L |
| 20 | G1 | S1 | NED | 115.8 | L | L | L |
| 35 | G1 | S3 | NED | 120.5 | L | H* | L |
| 9 | G1 | S3 | NED | 120.9 | L | H* | L |
| 3 | G1 | S1 | NED | 137.2 | L | L | L |
| 29 | G3 | S3 | AWC | 89.4 | L | H* | L |
| 54 | G1 | S4 | AWC | 105.6 | L | H* | L |
| 13 | G3 | S4 | Death | 3.2 | H | H | H |
| 48 | G2 | S4 | Death | 4.9 | H | H | H |
| 11 | G3 | S3 | Death | 18.8 | H | H | H |
| 60 | G3 | S4 | Death | 20.8 | H | H | H |
| 31 | G3 | S3 | Death | 22.6 | H | H | H |
| 53 | G3 | S4 | Death | 26.2 | H | H | H |
| 5 | G2 | S4 | Death | 31.7 | H | H | H |
| 12 | G2 | S4 | Death | 33.8 | H | H | H |
| 55 | G2 | S2 | Death | 55.8 | H | L* | H |
| 56 | G3 | S4 | AWC | 14.8 | U | H | L |
| 58 | G3 | S4 | AWC | 16.6 | U | H | H |
| 59 | G2 | S3 | NED | 41.1 | U | H | H |

Stage and grade information (columns 2, 3) is for primary tumor upon resection.
Outcomes (column 4) are: “no evidence of disease at last visit” (NED), “alive with cancer” (AWC), “other cause of death” (OCD) and “death” (due to cancer).
Duration (column 5) is months between nephrectomy and latest outcome assessment.
Outcome group (column 6) is the risk group based on actual patient outcome;
Pathology prognosis group (column 7) is based on staging of primary tumor;
Gene expression prognosis group (column 8) is based on molecular prognosis test based on genes in NODE 1281. Risk groups include high-risk (H), low-risk (L) and unknown (U).
*indicates deviation from actual risk group. for 20 minutes with the lid down. The array was then snap centrifugation dried (cDNA side up)

[0145] Prior to applying hybridization solution containing labeled probes (below), slides were blocked before target hybridization, using bovine serum albumin (BSA) solution (1% BSA, 5×SSC, 0.1% SDS) as described by Volpert et al., J Clin Invest (1999) 98(3): 671-679)., Blocking is preferably done within 1 hour of hybridization, most preferably immediately before.

Tissue cDNA Preparation

[0146] Samples (2 μg of poly(A)-RNA from each kidney tumor and from normal kidney tissue from the same patient were reverse transcribed with oligo (dT) primers and Superscript II (Life Technologies, Inc) in the presence of Cy5-dCTP and Cy3-dCTP (Amersham Pharmacia Biotech), respectively (Methods Enzynol (1999) 303:179-205). 10 The poly(A)-mRNA isolation procedure used by the inventors is detailed below, however, the skilled artisan will appreciate that any method of isolation and fluoro-labeling can be used. The inventors mixed 2 μg of mRNA with 2 μg of a regular or anchored oligo-dT primer in a total volume of 15 μl:

| | |
|---|---|
| Cy3 | Cy5 |

| | | | |
|---|---|---|---|
| mRNA | 2 μg | 2 μg | (Anchored: |
| | | | TTT TTT TTT TTT |
| | | | TTT TTT TTV N-3′)* |
| Oligo-dT | 2 μg | 2 μg | SEQ ID NO:498 |
| Total volume: | 15 μL | μL | |

*(“V” refers to A, G or C; “N” refers to A, G, C or T)

[0147] Next, the reaction mixture was heated to 70° C. for about 10 min and cooled on ice to which was added 15 μL of the following reaction mixture with denatured mRNA (for a total of 30 μl):

| | | Unlabeled | | |
|---|---|---|---|---|
| | | dNTPs | | |
| Reaction mixture*: | Vol μl | 100 mM | Vol μl | Final conc. |
| 5X first-strand buffer** | 6.0 | dATP | 25 | 25 mM |
| 0.1M DTT | 3.0 | dCTP | 15 | 15 mM |
| Unlabeled dNTPs | 0.6 | dGTP | 25 | 25 mM |
| Cy3 or Cy5-dCTP (1 mM, | 3.0 | dTTP | 25 | 25 mM |
| Amersham) | | | | |
| Superscript II (200 U/μL, | 2.0 | H₂O | 10 | |
| Gibco BRL) | | | | |
| H₂O | 0.4 | | | |
| Total volume: | 15 | Total | 100 | |
| | | volume: | | |

*Reaction mixture (Master Mix) available that contains buffer, DTT, dNTPs, and H₂O (combine 10 μl Master Mix with 3 μl Cy3 or Cy5 dye and 2 μl Superscript)
**5X first-strand buffer: 250 mM Tris-HCl (pH 8.3), 375 mM KCl, 15 mM MgCl2)

The combined reaction mix was incubated at 42° C. for 1.5-2hrs. RNA degradation was facilitated by the addition of 15 μl of 0.1 M NaOH, and incubation at 70° C. for 10 min. The degradation reaction was neutralized by addition of 15 μl of 0.1 M HCl, and the total volume was brought to 500 μl with TE (10 mM Tris, 1 mM EDTA).

[0148] Next, 20 μg of Cot-1 human DNA (GIBCO-BRL) was added to each sample. The target cDNAs (post RT-PCR replicons) were purified by centrifuging in a Microcon-30 micro-concentrator (Amicon, 10,000×g (rcf)for 10 min until ˜10 μl remained). Purification can be monitored by observing the concentration of the “colored probe.”

[0149] TE, 450 μl was added to each Microcon-30 unit and the retentate collected in a fresh microtube. The collected retentate from the previous step was added into the Microcon-30 unit containing the other sample in order to combine the separate probes (Cy3 and Cy5). The final volumes should be about 500 μl (if less than 500 μl, adjust with TE).

[0150] The 500 μl mix was spun with a microcon-30 (10,000×g (rcf)×12 min) containing labeled samples in order to concentrate again to a volume of less than 11 μl. Add 1 μL of 10 μg/μl polyA RNA (Sigma, #P9403) and 1 μl of 10 μg/μl tRNA (GIBCO-BRL, #15401-011) and adjust volume to 15-17 μl with distilled water.

[0151] The mixture was heated at 95° C. for 3 min. and briefly centrifuged to collect condensation. Then the denatured target was combined with equal volume of 2× hybridization solution preheated to 42° C. The mixture was heated at 95° C. for 3 min. and briefly centrifuged to collect condensation. Then the denatured target was combined with equal volume of 2× hybridization solution preheated to 42° C.

Hybridizing Microarrays Blocked with BSA

[0152] Immediately or shortly before hybridization the prepared microarray slides containing single stranded cDNA probes were BSA blocked (supra).

[0153] The 2×hybridization solution contains: 50% formamide; 10×SSC; 0.2% SDS. Final volume was 30-35 μl. The hybridization solution was incubated at 42° C. for 20-30 min. The labeled target +hybridization solution was then applied to a prepared microarray slide at 42° C. (using a hot block to preheat the slide and coverslip).

[0154] 20 μl H₂O was placed in the wells of the hybridization chamber. The slide was sealed in a hybridization chamber and placed in a 42° C. water bath. Microarrays were hybridized for ˜16-20 hours.

[0155] Slides were removed from hybridization chamber and immediately placed in a first rinse station with wafer holders/forceps (5 total wash/rinse stations): Exposure of labeled probe to light is to be minimized. The rinsing protocol is detailed below:
[0156] A. 1×SSC, 0.1% SDS (376 mls dH₂O, 20 mls 20×SSC, 4 mls 10% SDS) This first rinse is carried out at 42° C. until the cover slip is washed off, keep the slide in this solution for 5 minutes. Place slide in new metal tray in the next station.
[0157] B. 0.2×SSC, 0.1% SDS (392 mls dH₂O, 4 mls 20X SSC, 4 mls 10% SDS) Gently shake station with slides and holder on rotator for 5 minutes. Take individual slides out of the tray and place in next clean station.
[0158] C. 0.2×SSC (396 mls dH₂O, 4 mls 20×SSC) Shake gently for 5 minutes. Transfer entire slide holder into next station. Carry out this step three times, using fresh solution each time. Preferably, three stations are used where repeated washing steps are carried out with fresh solution.

[0159] Slides were dried by snap centrifugation (5 min. at 550 rpm) and scanned immediately using a commercially available confocal fluorescent scanner equipped with lasers operating at 532 nm and 635 nm wavelengths. (Scan Array Lite, GSI Lumonics).

Data Analysis

[0160] Images were analyzed using the software Genepix Pro 3.0 (Axon). Spots showing no signal or obvious defects were excluded from the analysis. Hybridization signal intensities from the remaining spots had the background subtracted and were tabulated in a red-to-green ratio, representing tumor mRNA expression relative to the mRNA expression of the corresponding normal kidney tissue. Ratios were log transformed and normalized so that the average ratio equaled zero. cDNAs with non-flagged spots in 75% of the experiments and with expression ratios that varied at least 2-fold in at least 2 experiments were selected for further analysis. The ratios were median-polished as described to provide values relative to the other samples. The software programs CLUSTER and TREEVIEW were used for hierarchical clustering and visualization (http://rana.standford.edu/software).

Clusterfinder

[0161] The present inventors developed the program “CLUSTERFINDER” to identify sub-clusters of polynucleotides that best distinguish between two defined sample groups. This clustering methodology entails, averaging the polynucleotides within a subcluster so that each patient has one expression value per subcluster. These expression value averages are separated into two groups based on the user-defined criteria. Here, staging criteria and patient fatality were employed. For each group of expression value averages, means (μ) and standard deviations (σ) were calculated. The discrimination score (ds) is calculated as follows:
ds=|μ₁−μ₂|/(σ₁+σ₂)

[0162] This metric maximizes difference between the means of the two groups and minimizes the variation within groups (Golub et al., supra). The method begins with the smallest clusters (2 cDNAs) and moves through a dendrogram identifying nodes in the tree that maximize both discrimination score and cluster size.

[0163] A permuted t-test was used to assess each cDNAs individual ability to distinguish between the two groups of patients (Hedenfalk, I., et al. (2001) N Engl J Med 344:539-48). Patients were randomly assigned into two groups 10,000 times. For each random permutation, a t-statistic was generated to test expression significance for each cDNA. The distribution of t-statistics was used to define a 99.9% significance threshold (α=0.001). If the t-statistic for the real distinction exceeded the 99.9% significance threshold, the CDNA was considered predictive.

[0164] This design permitted two valuable approaches to analyze the data. First, the use of the patient-matched normal tissue as a reference, against which mRNA expression in the tumors is measured, allows identification of aberrant polynucleotide expression (up or down) in each tumor. Second, since Cy3-labeled normal tissue was a common reference in all the experiments, values obtained from different experiments could be compared directly to identify gene expression patterns that would account for clinical differences such as grade, stage or aggressiveness of the tumor.

### EXAMPLE III

### Identification of Useful Probes for Up- and Down-Regulated Genes

[0165] The inventors first sought to identify genes that were up- or down-regulated regularly in tumor tissue relative to matched normal kidney tissue. The criterion for a useful probe was one that detected a gene that is up-regulated or down-regulated at least 2-fold in at least 75% of the CC-RCC samples. The inventors identified 129 clones (up) and 168 clones (down) respectively. See Tables 2-5.

Up-regulated genes included many notable coding sequences:

| | |
|---|---|
| (1) | ceruloplasmin, |
| (2) | an EST highly similar to growth factor |
| | responsive protein, |
| (3) | nicotinamide N-methyltransferase, |
| (4) | lysyl oxidase, |
| (5) | an EST highly similar to angiopoietin-related |
| | protein, |
| (6) | tumor necrosis factor α-induced protein 6, |
| (7) | insulin-like growth factor binding protein-3 |
| (8) | enolase-2, |
| (9) | fibronectin-1 and |
| (10) | vascular endothelial growth factor (VEGF). |

Down-regulated cDNAs included:

| | |
|---|---|
| (1) | kininogen, |
| (2) | fatty acid binding protein 1, |
| (3) | phenylalanine hydroxylase, |
| (4) | epidermal growth factor, and |
| (5) | plasminogen. |

[0166] In addition, six members of the metallothionein family were down regulated and coordinately expressed across all patients.

TABLE 2
First Set of Commonly Up-Regulated Genes in CC-RCC

| | | | SEQ | | INCIDENCE | | | |
|---|---|---|---|---|---|---|---|---|
| | GENBANK | | ID | AVERAGE | % OF RCC* | | CELERA | |
| | ACCESSION # | NAME (FROM RESEARCH GENETICS DATABASE) | NO: | FOLD UP | 2-FOLD* | 3-FOLD** | NO# | E VALUE |
| 1 | H86554 | Ceruloplasmin (ferroxidase) | 40 | 16.9 | 96.2 | 96.2 | hCG21213 | 6 × 10⁻⁸⁵ |
| 2 | R00332 | ESTs, highly similar to growth factor-responsive protein, | 41 | 14.1 | 96.4 | 96.4 | hCG41109 | 2 × 10⁻⁶² |
| | | vascular smooth muscle [R. norvegicus] | | | | | | |
| 3 | T72235 | Nicotinamide N-methyltransferase | 42 | 13.5 | 96.6 | 96.6 | hCG39357 | 10⁻¹⁰² |
| 4 | W72051 | Fatty acid binding protein 7, brain | 43 | 13.2 | 87.5 | 75.0 | hCG19286 | 10⁻¹⁸⁰ |
| 5 | W70343 | Lysyl oxidase | 44 | 11.2 | 95.8 | 87.5 | hCG37363 | 10⁻⁷⁵ |
| 6 | H99075 | ESTs | 44 | 10.7 | 95.7 | 87.0 | hCG37363 | 0 |
| 7 | W30988 | ESTs, highly similar to angiopoietin-related | 45 | 11.1 | 100.0 | 100.0 | hCG23958 | 10⁻¹¹¹ |
| 8 | T54298 | protein [H. sapiens] | 45 | 8.1 | 100.0 | 96.6 | hCG23958 | 10⁻¹⁵³ |
| 9 | N50654 | Ceruloplasmin (ferroxidase) | 46 | 10.6 | 95.8 | 95.8 | hCG21214 | 10⁻¹⁴⁶ |
| 10 | W93163 | Tumor necrosis factor, α-induced protein 6 | 47 | 10.5 | 100.0 | 100.0 | hCG41965 | 6 × 10⁻⁷⁶ |
| 11 | AA598601 | Insulin-like growth factor binding protein 3 | 48 | 7.6 | 96.6 | 89.7 | hCG18013 | 0 |
| 12 | AA678335 | H. sapiens phosphodiesterase I/nucleotide | 49 | 7.6 | 84.0 | 84.0 | hCG18059 | 10⁻¹⁴⁵ |
| | | yrophosphatase 3 (PDNP3) mRNA | | | | | | |
| 13 | AA164819 | ESTs | 50 | 7.1 | 96.3 | 88.9 | hCG38036 | 0 |
| 14 | AA485896 | | 50 | 6.8 | 96.4 | 89.3 | hCG38036 | 10⁻¹⁴⁵ |
| 15 | N26171 | ESTs | 51 | 6.2 | 87.5 | 79.2 | hCG19701 | 0 |
| 16 | AA487787 | Von Willebrand factor | 52 | 6.2 | 100.0 | 87.5 | hCG24322 | 10⁻¹⁶⁸ |
| 17 | AA450189 | Enolase 2, (γ, neuronal) | 53 | 6.0 | 96.4 | 92.9 | hCG25937 | 0 |
| 18 | R62612 | Fibronectin 1 | 54 | 5.6 | 93.1 | 79.3 | hCG16692 | 2 × 10⁻⁵¹ |
| 19 | H20872 | FcγIIIaR (CD16); low affinity receptor | 55 | 5.5 | 85.7 | 82.1 | hCG16608 | 0 |
| | | for IgG Fc fragment | | | | | | |
| 20 | W72293 | ESTs | 56 | 5.5 | 93.1 | 89.7 | hCG20029 | 2 × 10⁻⁵⁸ |
| 21 | AA055835 | Caveolin 1, caveolae protein, 22 kD | 57 | 5.4 | 92.9 | 75.0 | hCG39088 | 10⁻¹²¹ |
| 22 | AA873159 | Apolipoprotein C-I | 58 | 5.3 | 88.9 | 81.5 | hCG22139 | 4 × 10⁻⁶⁸ |
| 23 | AA017544 | Regulator of G-protein signalling 1 | 59 | 5.2 | 85.7 | 82.1 | hCG39901 | 10⁻¹⁷⁹ |
| 24 | R19956 | Vascular endothelial growth factor | 60 | 5.1 | 96.4 | 85.7 | hCG18998 | 4 × 10⁻⁹⁰ |
| 25 | H99816 | Procollagen-lysine, 2-oxoglutarate 5-dioxygenase | 61 | 5.1 | 96.4 | 78.6 | hCG16089 | 10⁻¹⁴⁹ |
| | | (lysine hydroxylase) 2 | | | | | | |
| 26 | R49597 | ESTs | 62 | 4.6 | 95.8 | 75.0 | hCG15938 | 4 × 10⁻⁸³ |
| 27 | AA405000 | H. sapiens ribonuclease 6 precursor mRNA | 63 | 4.5 | 96.2 | 80.8 | hCG15018 | 10⁻¹⁴⁹ |
| 28 | H58873 | Solute carrier family 2 (facilitated glucose transporter), | 64 | 4.5 | 93.1 | 86.2 | hCG23157 | 10⁻¹⁷⁶ |
| | | member 1 | | | | | | |
| 29 | T62491 | Chemokine (C-X-C motif), receptor 4 (fusin) | 65 | 4.4 | 89.7 | 75.9 | hCG25754 | 10⁻¹²⁶ |
| 30 | AA443899 | DC36 (collagen type I receptor, thrombospondin | 66 | 4.2 | 89.3 | 75.0 | hCG25301 | 0 |
| | | receptor-like 1 | | | | | | |
| 31 | AI004331 | Human MHC class II HLA-DQβ mRNA (DR7 DQw2), | 67 | 4.1 | 85.7 | 78.6 | CG201516 | 0 |
| | | complete cds | | | | | | |
| 32 | AA488892 | ESTs, Weakly similar to gag-pol polyprotein | 68 | 4.0 | 85.7 | 75.0 | hCG95780 | 5 × 10⁻⁸⁹ |
| | | [M. musculus] | | | | | | |

*The values in this column are the % of CC-RCC patients in whom a given gene was expressed at least 3-fold higher compared to control kidney tissue. Genes included in this Table met or exceeded this threshold in at least 75% of CC-RCC patients.
**The values in this column are the % of CC-RCC patients in whom a given gene was expressed at least 2-fold higher compared to control kidney tissue. Genes included in this Table met or exceeded this threshold in at least 75% of CC-RCC patients.

[0167] TABLE 3
Second Set of Commonly Up-Regulated Genes in CC-RCC

| | | | SEQ | AVERAGE | |
|---|---|---|---|---|---|
| | GENBANK | | ID | FOLD | INCIDENCE |
| | ACCESSION # | NAME (FROM RESEARCH GENETICS DATABASE) | NO: | UP | % OF RCC* |
| 1 | AA101875 | Chondroitin sulfate proteoglycan 2 (versican) | 140 | 5.5 | 80.8 |
| 2 | W60845 | Cell division cycle 42 (GTP-binding protein, 25 kD) | 141 | 4.8 | 77.8 |
| 3 | AA457700 | Cytochrome b-561 | 142 | 4.8 | 88.9 |
| 4 | H95819 | ESTs | 143 | 4.7 | 91.3 |
| 5 | AA136707 | Procollagen-lysine, 2-oxoglutarate | 144 | 4.5 | 96.4 |
| | | 5-dioxygenase (lysine hydroxylase) 2 | | | |
| 6 | R43605 | KIAA0293 protein | 145 | 4.4 | 93.1 |
| 7 | N63943 | Lysozyme (renal amyloidosis) | 146 | 4.2 | 82.8 |
| 8 | N76878 | Decidual protein induced by progesterone | 147 | 4.1 | 86.2 |
| 9 | R95749 | ESTs | 148 | 4.1 | 88.9 |
| 10 | AA417622 | ESTs | 149 | 4.0 | 92.9 |
| 11 | AA460224 | ESTs | 150 | 3.9 | 92.6 |
| 12 | AA460152 | Serum-inducible kinase | 151 | 3.9 | 86.2 |
| 13 | W72329 | Lymphotoxin α (TNF superfamily, member 1) | 152 | 3.9 | 82.1 |
| 14 | AA700054 | Adipose differentiation-related protein; adipophilin | 153 | 3.9 | 86.2 |
| 15 | W80701 | ESTs, Weakly similar to HERV-E envelope | 154 | 3.8 | 91.7 |
| | | glycoprotein [H. sapiens] | | | |
| 16 | AA442984 | major histocompatibility complex (MHC) class II, DQβ1 | 155 | 3.8 | 86.2 |
| 17 | H12338 | TYRO protein tyrosine kinase binding protein | 156 | 3.8 | 89.7 |
| 18 | AA629189 | keratin 4 | 157 | 3.8 | 85.7 |
| 19 | AA176581 | myoglobin | 158 | 3.8 | 82.1 |
| 20 | R33363 | decidual protein induced by progesterone | 159 | 3.7 | 93.1 |
| 21 | AA456821 | ESTs, Weakly similar to intrinsic factor-B12 | 160 | 3.7 | 87.0 |
| | | receptor precursor [H. sapiens] | | | |
| 22 | R43734 | laminin, α4 | 161 | 3.7 | 82.1 |
| 23 | N38801 | ESTs, Highly similar to Complement C1q | 162 | 3.7 | 89.7 |
| | | subcomponent, C chain precursor | | | |
| 24 | AA458472 | MHC, class II, DQ β 1 | 163 | 3.6 | 79.3 |
| 25 | AA489611 | lactate dehydrogenase A | 164 | 3.5 | 89.7 |
| 26 | N90491 | ESTs, Highly similar to Complement C1q | 165 | 3.5 | 88.9 |
| | | subcomponent, C chain precursor | | | |
| 27 | N30205 | ESTs | 166 | 3.4 | 79.3 |
| 28 | R47979 | Human HLA-DR α-chain mRNA | 167 | 3.4 | 75.9 |
| 29 | T62849 | ESTs | 168 | 3.4 | 81.8 |
| 30 | AA425450 | glycoprotein (transmembrane) nmb | 169 | 3.4 | 81.5 |
| 31 | N94616 | laminin, α 4 | 170 | 3.3 | 77.8 |
| 32 | AA478542 | A kinase (PRKA) anchor protein (gravin) 12 | 171 | 3.3 | 79.3 |
| 33 | AA236164 | cathepsin S | 172 | 3.3 | 85.7 |
| 34 | AA677340 | phosphorylase kinase, α 2 (liver) | 173 | 3.3 | 82.1 |
| 35 | AA002126 | apoptosis inhibitor 2 | 174 | 3.3 | 84.0 |
| 36 | AA486627 | MHC class II, DPβ1 | 175 | 3.3 | 75.9 |
| 37 | AA486567 | ESTs | 176 | 3.3 | 91.7 |
| 38 | W37864 | phosphatase and tensin homolog | 177 | 3.3 | 88.9 |
| | | (mutated in multiple advanced cancers 1) | | | |
| 39 | H15662 | KIAA0291 protein | 178 | 3.3 | 80.8 |
| 40 | N71028 | ESTs | 179 | 3.3 | 82.8 |
| 41 | AA421296 | CD68 antigen | 180 | 3.3 | 82.8 |
| 42 | W60701 | MHC class I, A | 181 | 3.2 | 75.9 |
| 43 | AA599138 | ESTs | 182 | 3.2 | 89.3 |
| 44 | AA634028 | Human mRNA for SB class II MHC α-chain | 183 | 3.2 | 79.3 |
| 45 | AA682558 | ESTs | 184 | 3.2 | 81.8 |
| 46 | AA132090 | CD53 antigen | 185 | 3.2 | 81.5 |
| 47 | R97251 | Homo sapiens clone 24655 mRNA sequence | 186 | 3.1 | 85.7 |
| 48 | H79353 | Fc fragment of IgE, high affinity I, receptor for; γ polypeptide | 187 | 3.1 | 85.7 |
| 49 | W73144 | lymphocyte cytosolic protein 1 (L-plastin) | 188 | 3.1 | 79.3 |
| 50 | AI005515 | hexokinase 2 | 189 | 3.1 | 81.8 |
| 51 | AA478585 | butyrophilin, subfamily 3, member A3 | 190 | 3.0 | 75.9 |
| 52 | AA126982 | sin3-associated polypeptide, 30 kD | 191 | 3.0 | 80.0 |
| 53 | AA644657 | MHC class I, A | 192 | 3.0 | 82.8 |
| 54 | AA425806 | Suppressin (nuclear deformed epidermal | 193 | 3.0 | 78.6 |
| | | autoregulatory factor-1 (DEAF-1)-related) | | | |
| 55 | T89391 | Caveolin 2 | 194 | 3.0 | 78.6 |
| 56 | H11732 | ESTs | 195 | 3.0 | 79.2 |
| 57 | AA083407 | Stimulated trans-acting factor (50 kDa) | 196 | 3.0 | 77.8 |
| 58 | AA702254 | MHC, class II, DN α | 197 | 2.9 | 82.8 |
| 59 | W88967 | MHC, class II, DR β 1 | 198 | 2.9 | 75.9 |
| 60 | AA491191 | interferon, γ-inducible protein 16 | 199 | 2.9 | 82.1 |
| 61 | AA157813 | interferon, α-inducible protein 27 | 200 | 2.9 | 76.9 |
| 62 | AA777488 | ESTs, moderately similar to | 201 | 2.9 | 75.9 |
| | | glyceraldehyde-3-phosphate dehydrogenase, liver | | | |
| 63 | N66053 | Butyrophilin, subfamily 3, member A1 | 202 | 2.9 | 75.9 |
| 64 | AA988615 | Human HLA-F gene | 203 | 2.8 | 78.6 |
| 65 | N32226 | ESTs | 204 | 2.8 | 77.8 |
| 66 | T63324 | MHC, class II, DQ α1 | 205 | 2.8 | 75.9 |
| 67 | AA669055 | MHC, class II, DQ β1 | 206 | 2.8 | 79.3 |
| 68 | AA102068 | heat shock transcription factor 4 | 207 | 2.8 | 78.6 |
| 69 | H95960 | secreted protein, acidic, cysteine-rich (osteonectin) | 208 | 2.8 | 75.9 |
| 70 | T84762 | Homo sapiens mRNA; cDNA DKFZp434O071 | 209 | 2.8 | 85.2 |
| | | (from clone DKFZp434O071) | | | |
| 71 | AA664195 | MHC, class II, DR β1 | 210 | 2.8 | 75.0 |
| 72 | AA453978 | GM2 ganglioside activator protein | 211 | 2.7 | 84.0 |
| 73 | AA464246 | MHC, class I, C | 212 | 2.7 | 82.8 |
| 74 | H26176 | Homo sapiens mRNA; cDNA DKFZp564E1616 | 213 | 2.7 | 77.8 |
| | | (from clone DKFZp564E1616) | | | |
| 75 | AA456063 | Homo sapiens mRNA for hCRNN4, complete cds | 214 | 2.7 | 78.6 |
| 76 | AA708621 | ESTs, [H. sapiens] | 215 | 2.7 | 89.3 |
| 77 | AA284954 | colony stimulating factor 1 receptor, formerly | 216 | 2.7 | 85.2 |
| | | McDonough feline sarcoma viral (v-fms) | | | |
| | | oncogene homolog | | | |
| 78 | AA521292 | ATP-binding cassette, sub-family A (ABC1), member 1 | 217 | 2.7 | 80.8 |
| 79 | R92609 | colony stimulating factor 1 receptor, formerly | 218 | 2.6 | 77.3 |
| | | McDonough feline sarcoma viral (v-fms) | | | |
| | | oncogene homolog | | | |
| 80 | R33609 | ESTs | 219 | 2.6 | 82.8 |
| 81 | AA430540 | collagen, type IV, α 2 | 220 | 2.6 | 79.3 |
| 82 | H41165 | Ribosomal protein S19 | 221 | 2.6 | 82.8 |
| 83 | AA485371 | Bone marrow stromal cell antigen 2 | 222 | 2.5 | 75.9 |
| 84 | AA461309 | ESTs, Weakly similar to predicted | 223 | 2.5 | 75.0 |
| | | using Genefinder [C. elegans] | | | |
| 85 | AA130874 | ESTs, Weakly similar to [H. sapiens] | 224 | 2.5 | 75.9 |
| 86 | T62048 | Complement component 1, s subcomponent | 225 | 2.5 | 76.0 |
| 87 | T69304 | TAP binding protein (tapasin) | 226 | 2.5 | 79.2 |
| 88 | AA463188 | Putative serine-threonine protein kinase | 227 | 2.5 | 81.5 |
| 89 | W37721 | ESTs | 228 | 2.4 | 75.9 |
| 90 | AA862434 | Proteasome (macropain) subunit, β type, 9 | 229 | 2.4 | 75.0 |
| | | (large multifunctional protease 2) | | | |
| 91 | R22412 | Platelet/endothelial cell adhesion | 230 | 2.4 | 75.9 |
| | | molecule (CD31 antigen) | | | |

*The values in this column are the % of CC-RCC patients in whom a given gene was expressed at least 2-fold higher compared to control kidney tissue. Genes included in this Table met or exceeded this threshold in at least 75% of CC-RCC patients (but did not exceed the threshold of 3 fold upregulation in this percentage of patients

[0168] TABLE 4
First Set of Commonly Down-Regulated Genes in CC-RCC

| | GENBANK | | SEQ | AVERAGE | INCIDENCE | | | |
|---|---|---|---|---|---|---|---|---|
| | ACCESSION | NAME | ID | FOLD | % OF RCC* | | CELERA | |
| | # | (FROM RESEARCH GENETICS DATABASE) | NO: | DOWN | 2-FOLD* | 3-FOLD** | NO# | E VALUE^{§} |
| 1 | R89067 | Kininogen | 69 | 27.2 | 100.0 | 100.0 | hCG16151 | 10⁻¹⁶¹ |
| 2 | AA705692 | ESTs | 69 | 18.0 | 100.0 | 100.0 | hCG16151 | 0 |
| 3 | T53220 | Fatty acid binding protein 1, liver | 70 | 22.8 | 95.8 | 95.8 | hCG32947 | 10⁻⁴⁹ |
| 4 | AA682293 | Phenylalanine hydroxylase | 71 | 20.4 | 96.0 | 96.0 | hCG21871 | 0 |
| 5 | AA954947 | Epidermal growth factor (β-urogastrone) | 72 | 15.0 | 100.0 | 100.0 | hCG19911 | 0 |
| 6 | H72098 | aldolase B, fructose-bisphosphate | 73 | 13.6 | 100.0 | 96.6 | hCG27655 | 0 |
| 7 | AA411988 | EST | 74 | 13.3 | 100.0 | 96.4 | hCG28257 | 0.014 |
| 8 | T73187 | Plasminogen | 75 | 12.0 | 100.0 | 89.3 | hCG32944 | 3 × 10⁻⁵⁶ |
| 9 | T51617 | solute carrier family 22 (organic cation | 75 | 11.8 | 96.4 | 92.9 | hCG32944 | 10⁻¹⁶⁹ |
| | | transporter, member 3) | | | | | | |
| 10 | AA777384 | ESTs | 76 | 11.0 | 96.2 | 92.3 | hCG17572 | 0 |
| 11 | H53340 | Metallothionein 1G | 77 | 10.0 | 100.0 | 93.1 | hCG40931 | 7 × 10⁻⁶⁴ |
| 12 | AA844930 | Glycoprotein 2 (zymogen granule membrane) | 78 | 9.6 | 100.0 | 96.6 | hCG34445 | 2 × 10⁻⁸⁹ |
| 13 | | | 79 | 9.4 | 96.6 | 96.6 | | |
| 14 | AA858026 | protein C inhibitor-plasminogen activator inhibitor 3 | 80 | 9.4 | 100.0 | 96.6 | hCG40087 | 4 × 10⁻⁴ |
| 15 | H18950 | ESTs, similar to hepatocyte nuclear factor 4 γ | 81 | 9.2 | 100.0 | 96.6 | hCG40025 | 10⁻¹⁶⁹ |
| | | [H. sapiens] | | | | | | |
| 16 | | | 82 | 8.9 | 96.6 | 96.6 | | |
| 17 | AA040387 | X-prolyl aminopeptidase (aminopeptidase P) 2, | 83 | 8.8 | 96.4 | 96.4 | hCG20708 | 10⁻¹³³ |
| | | membrane-bound | | | | | | |
| 18 | H77766 | Metallothionein 1H | 84 | 8.4 | 96.6 | 86.2 | hCG23909 | 10⁻¹⁵¹ |
| 19 | N55459 | RNA helicase-related protein | 84 | 6.9 | 96.6 | 79.3 | hCG23909 | 6 × 10⁻⁹⁷ |
| 20 | H72722 | ESTs, similar to metallothionein-IB [H. sapiens] | 84 | 5.2 | 86.2 | 75.9 | hCG23909 | 10⁻⁶¹ |
| 21 | W16424 | ESTs | 85 | 8.4 | 92.6 | 85.2 | hCG41126 | 0 |
| 22 | H88329 | Calbindin 1, (28 kD) | 86 | 8.1 | 100.0 | 92.9 | hCG33059 | 10⁻¹⁴⁶ |
| 23 | N62179 | Methylmalonate-semialdehyde dehydrogenase | 87 | 7.9 | 100.0 | 96.4 | hCG21723 | 10⁻¹⁷⁹ |
| 24 | AA460298 | | 87 | 4.4 | 91.7 | 75.0 | hCG21723 | 0 |
| 25 | AA775872 | Glypican 3 | 88 | 7.9 | 100.0 | 100.0 | hCG14619 | 10⁻¹³³ |
| 26 | AA457718 | H. sapiens mRNA; cDNA DKFZp564B076 (from | 89 | 7.8 | 95.7 | 87.0 | hCG18130 | 0 |
| | | clone DKFZp564B076) | | | | | | |
| 27 | R24266 | Growth factor receptor-bound protein 14 | 90 | 7.1 | 80.8 | 76.9 | hCG40120 | 10⁻¹⁰⁴ |
| 28 | R54778 | Collagen, type XVI, α1 | 91 | 7.1 | 100.0 | 95.8 | hCG41613 | 10⁻¹⁰¹ |
| 29 | AA702640 | DOPA decarboxylase (aromatic | 92 | 7.0 | 96.3 | 85.2 | hCG18339 | 0 |
| | | L-amino acid decarboxylase) | | | | | | |
| 30 | AA664180 | Glutathione peroxidase 3 (plasma) | 93 | 6.6 | 92.9 | 85.7 | hCG39155 | 2 × 10⁻⁷⁴ |
| 31 | R10382 | Protein C inhibitor (plasminogen | 94 | 6.4 | 92.6 | 88.9 | hCG16021 | 0.058 |
| | | activator inhibitor 3 (PAI-3) | | | | | | |
| 32 | AA227594 | Mal, T-cell differentiation protein | 95 | 6.3 | 100.0 | 86.2 | hCG38742 | 10⁻¹⁴¹ |
| 33 | H68509 | UDP glycosyltransferase-2 family, polypeptide B10 | 96 | 6.1 | 95.5 | 86.4 | hCG41481 | 0.25 |
| 34 | AA676466 | Argininosuccinate synthetase | 97 | 6.1 | 96.4 | 85.7 | hCG40893 | 0 |
| 35 | H96140 | acyl-coenzyme A dehydrogenase, short/branched | 98 | 6.0 | 96.0 | 96.0 | hCG40572 | 10⁻¹⁸ |
| | | chain | | | | | | |
| 36 | H11346 | Aldehyde dehydrogenase 4 (glutamate | 99 | 6.0 | 92.9 | 89.3 | hCG25108 | 0 |
| | | γ-semialdehyde dehydrogenase; | | | | | | |
| | | pyrroline-5-carboxylate | | | | | | |
| | | dehydrogenase) | | | | | | |
| 37 | AA862999 | calcium-sensing receptor (hypercalcemia 1, | 100 | 6.0 | 100.0 | 92.9 | hCG14928 | 0 |
| | | severe neonatal hyperparathyroidism) | | | | | | |
| 38 | AA497001 | ESTs, weakly similar to BcDNA.GH02901 | 101 | 6.0 | 96.3 | 88.9 | hCG29639 | 0 |
| | | [D. melanogaster] | | | | | | |
| 39 | AA449780 | EST | 102 | 5.9 | 88.9 | 77.8 | hCG32613 | 2 × 10⁻³⁶ |
| 40 | H11369 | aldehyde dehydrogenase 4 (glutamate | 103 | 5.8 | 92.9 | 85.7 | hCG37443 | 10⁻¹⁵¹ |
| | | γ-semialdehyde dehydrogenase; | | | | | | |
| | | pyrroline-5-carboxylate | | | | | | |
| | | dehydrogenase) | | | | | | |
| 41 | AA704995 | Putative glycine-N-acyltransferase | 104 | 5.6 | 92.9 | 78.6 | hCG38673 | 0 |
| 42 | T94781 | Potassium inwardly-rectifying channel, | 105 | 5.6 | 92.9 | 78.6 | hCG22477 | 0.07 |
| | | subfamily J, member 15 | | | | | | |
| 43 | N89673 | ESTs | 106 | 5.6 | 92.6 | 81.5 | hCG39647 | 5 × 10⁻⁵⁹ |
| 44 | H37880 | ESTs, | 107 | 5.6 | 96.3 | 88.9 | hCG29091 | 0 |
| 45 | AA663884 | synaptosomal-associated protein, 25 kD | 108 | 5.5 | 95.7 | 87.0 | hCG40236 | 3 × 10⁻⁸⁸ |
| 46 | R25818 | aldehyde dehydrogenase 9 (γ-aminobutyraldehyde | 109 | 5.5 | 100.0 | 91.3 | hCG21745 | 10⁻¹⁴² |
| | | dehydrogenase, E3 isozyme) | | | | | | |
| 47 | AA700604 | Sorbitol dehydrogenase | 110 | 5.4 | 92.6 | 85.2 | hCG96145 | 0.36 |
| 48 | W95082 | Hydroxysteroid (11-β) dehydrogenase 2 | 111 | 5.4 | 96.6 | 89.7 | hCG27201 | 10⁻¹³² |
| 49 | AA677655 | Klotho | 112 | 5.4 | 92.3 | 80.8 | hCG32197 | 0 |
| 50 | N80129 | metallothionein 1L | 113 | 5.3 | 86.2 | 79.3 | hCG24714 | 10⁻¹¹¹ |
| 51 | AA402915 | aminoacylase 1 | 114 | 5.3 | 96.3 | 85.2 | hCG42576 | 4 × 10⁻⁹⁸ |
| 52 | AA863424 | dipeptidase 1 (renal) | 115 | 5.2 | 93.1 | 82.8 | hCG18560 | 0.05 |
| 53 | N78083 | Glycine dehydrogenase (decarboxylating; glycine | 116 | 5.1 | 96.4 | 92.9 | hCG31017 | 9 × 10⁻⁶⁹ |
| | | decarboxylase, glycine cleavage system protein P) | | | | | | |
| 54 | R06601 | ESTs, Moderately similar to metallothionein-II | 117 | 5.1 | 82.8 | 75.9 | hCG39693 | 4 × 10⁻³⁴ |
| | | [H. sapiens] | | | | | | |
| 55 | AA872383 | Metallothionein 1E (functional) | 117 | 4.8 | 82.8 | 75.9 | hCG39693 | 10⁻⁸⁶ |
| 56 | AA131240 | ESTs | 118 | 5.0 | 92.0 | 80.0 | hCG14827 | 0.02 |
| 57 | AA485965 | Succinate-CoA ligase, GDP-forming, α subunit | 119 | 4.9 | 92.9 | 89.3 | hCG33938 | 10⁻¹¹⁴ |
| 58 | AA196287 | ESTs, weakly similar to alternatively spliced | 120 | 4.9 | 96.6 | 89.7 | hCG21724 | 0 |
| | | product using exon 13A [H. sapiens] | | | | | | |
| 59 | R61229 | glycine amidinotransferase (L-arginine:glycine | 121 | 4.8 | 82.8 | 75.9 | hCG38743 | 10⁻¹³⁸ |
| | | amidinotransferase) | | | | | | |
| 60 | N23898 | G protein-coupled receptor kinase 2 | 122 | 4.8 | 92.9 | 82.1 | hCG20632 | 4 × 10⁻⁸⁹ |
| | | (Drosophila-like) | | | | | | |
| 61 | AA699427 | Fructose-bisphosphatase 1 | 123 | 4.7 | 93.1 | 82.8 | hCG32887 | 0 |
| 62 | | | 124 | 4.7 | 96.2 | 84.6 | | |
| 63 | AA873355 | ATPase, Na+/K+ transporting, α 1 polypeptide | 125 | 4.7 | 100.0 | 93.1 | hCG37943 | 10⁻¹⁰⁵ |
| 64 | AI000188 | UDP glycosyltransferase 2 family, polypeptide B7 | 126 | 4.6 | 85.7 | 75.0 | hCG40932 | 2 × 10⁻⁵¹ |
| 65 | N53031 | UDP glycosyltransferase 2 family, polypeptide B4 | 126 | 4.0 | 86.2 | 75.9 | hCG40932 | 2 × 10⁻¹² |
| 66 | AA459197 | Sodium channel, nonvoltage-gated 1 α | 127 | 4.6 | 89.7 | 75.9 | hCG24314 | 0 |
| 67 | W86431 | Protein C inhibitor (PAI-3) | 128 | 4.4 | 100.0 | 76.9 | hCG22335 | 8 × 10⁻⁵ |
| 68 | T65482 | L-3-hydroxyacyl-Coenzyme A dehydrogenase, | 129 | 4.4 | 96.2 | 76.9 | hCG19900 | 10⁻¹²⁷ |
| | | short chain | | | | | | |
| 69 | AA457374 | DKFZP586B0319 protein | 130 | 4.3 | 91.7 | 75.0 | hCG20212 | 0 |
| 70 | R33037 | ESTs | 131 | 4.3 | 92.0 | 76.0 | hCG18871 | 10⁻¹⁴⁰ |
| 71 | AA437099 | ESTs | 132 | 4.3 | 85.2 | 77.8 | hCG18095 | 0 |
| 72 | W01011 | SA (rat hypertension-associated) homolog | 133 | 4.2 | 89.7 | 75.9 | hCG37242 | 4 × 10⁻⁸⁴ |
| 73 | R16596 | EST, moderately similar to Cd-7 | 134 | 4.1 | 86.2 | 75.9 | hCG21792 | 2 × 10⁻⁶⁷ |
| | | Metallothionein-2 [H. sapiens] | | | | | | |
| 74 | AA863449 | Oviductal glycoprotein 1, 120 kD | 135 | 4.0 | 92.9 | 75.0 | HCG39984 | 10⁻¹⁴¹ |
| 75 | AA458884 | S100 calcium-binding protein A2 | 136 | 4.0 | 92.9 | 75.0 | hCG15472 | 6 × 10⁻⁹⁰ |
| 76 | AA608575 | Propionyl coenzyme A carboxylase, α polypeptide | 137 | 3.8 | 89.7 | 75.9 | hCG24579 | 10⁻¹¹⁶ |
| 77 | H18608 | Solute carrier family 22 (organic anion | 138 | 3.6 | 89.3 | 78.6 | hCG21316 | 10⁻¹⁴¹ |
| | | transporter), member 8 | | | | | | |

*The values in this column are the % of CC-RCC patients in whom a given gene was expressed at least 3-fold lower compared to control kidney tissue. Genes included in this Table met or exceeded this threshold in at least 75% of CC-RCC patients.
**The values in this column are the % of CC-RCC patients in whom a given gene was expressed at least 2-fold lower compared to control kidney tissue. Genes included in this Table met or exceeded this threshold in at least 75% of CC-RCC patients.
^{§}The E Value is a statistical value reflecting the probability that the match between the probe sequence and the sequence in the Celera database is due to chance alone. Thus very low values indicate virtual certainty that the sequence being queried corresponds to the particular gene in the database.

[0169] TABLE 5
Second Set Commonly Down-Regulated Genes in CC-RCC

| | | | SEQ | AVERAGE | INCIDENCE |
|---|---|---|---|---|---|
| | GENBANK | | ID | FOLD | % OF |
| | ACCESSION # | NAME (FROM RESEARCH GENETICS DATABASE) | NO: | Down | RCC* |
| 1 | AA454810 | Membrane component, chrom. 1, surface marker 1 | 231 | 5.2 | 88.5 |
| | | (40 kD glycoprotein, identified by monoclonal | | | |
| | | antibody GA733) | | | |
| 2 | N73241 | Solute carrier family 17 (sodium phosphate), member 1 | 232 | 5.2 | 91.7 |
| 3 | W85851 | ESTs | 233 | 5.2 | 75.9 |
| 4 | AA047666 | Flavin containing monooxygenase 1 | 234 | 4.9 | 82.1 |
| 5 | AA455632 | Human chromosome 3p21.1 gene sequence, complete cds | 235 | 4.8 | 89.3 |
| 6 | R98851 | Membrane metallo-endopeptidase (neutral | 236 | 4.6 | 82.8 |
| | | endopeptidase, enkephalinase, CALLA, CD10) | | | |
| 7 | N74679 | Homo sapiens mRNA for G3a protein (located | 237 | 4.6 | 85.2 |
| | | in the class III region of the MHC | | | |
| 8 | N51498 | ESTs | 238 | 4.6 | 82.6 |
| 9 | R60170 | ESTs | 239 | 4.5 | 75.0 |
| 10 | AA460012 | Solute carrier family 22 (organic cation | 240 | 4.4 | 95.7 |
| | | transporter), member 3 | | | |
| 11 | R42433 | H. sapiens mRNA for protein tyrosine phosphatase | 241 | 4.4 | 87.0 |
| 12 | R83190 | ESTs, similar to alanine-glyoxylate aminotransferase | 242 | 4.3 | 88.5 |
| | | 2 precursor from rat (R. norvegicus) | | | |
| 13 | R97050 | ESTs | 243 | 4.2 | 85.7 |
| 14 | T67549 | Plasminogen | 244 | 4.2 | 86.4 |
| 15 | AA862465 | Alpha-2-glycoprotein 1, zinc | 245 | 4.1 | 93.1 |
| 16 | H08720 | ESTs | 246 | 4.1 | 96.4 |
| 17 | N35592 | ESTs | 247 | 4.1 | 93.1 |
| 18 | AA284067 | ESTs | 248 | 4.0 | 92.6 |
| 19 | AA447115 | Stromal cell-derived factor 1 | 249 | 4.0 | 79.2 |
| 20 | T50788 | UDP glycosyltransferase 2 family, polypeptide B15 | 250 | 4.0 | 85.2 |
| 21 | AA448710 | ESTs | 251 | 4.0 | 77.8 |
| 22 | AA480851 | Claudin 10 | 252 | 3.8 | 89.3 |
| 23 | AA099593 | KIAA0977 protein | 253 | 3.8 | 88.9 |
| 24 | T58958 | Betaine-homocysteine methyltransferase | 254 | 3.8 | 79.3 |
| 25 | AA872602 | Parathyroid hormone receptor 1 | 255 | 3.8 | 93.1 |
| 26 | R44346 | ESTs, Weakly similar to T27A1.5 [C. elegans] | 256 | 3.8 | 86.2 |
| 27 | AA452278 | Solute carrier family 4, sodium bicarbonate cotransporter, member 4 | 257 | 3.7 | 85.2 |
| 28 | N74025 | Homo sapiens deiodinase, iodothyronine, type I (DIO1) mRNA | 258 | 3.7 | 92.3 |
| 29 | AA757672 | ESTs | 259 | 3.6 | 100.0 |
| 30 | AA135958 | ESTs | 260 | 3.6 | 75.9 |
| 31 | AA455800 | Gamma-glutamyl hydrolase (conjugase, folylpoly-γ-glutamyl hydrolase) | 261 | 3.6 | 82.1 |
| 32 | AA504160 | ATPase, H+ transporting, lysosomal (vacuolar proton pump), | 262 | 3.6 | 95.5 |
| | | α polypeptide, 70 kD, isoform 1 | | | |
| 33 | AA044205 | ESTs | 263 | 3.6 | 80.0 |
| 34 | H90507 | Plasminogen | 264 | 3.5 | 82.1 |
| 35 | AA427619 | ESTs, Weakly similar to α 1,2-mannosidase IB [H. sapiens] | 265 | 3.5 | 91.7 |
| 36 | W02265 | Translational inhibitor protein p14.5 | 266 | 3.5 | 75.9 |
| 37 | H17921 | ESTs | 267 | 3.5 | 92.0 |
| 38 | R76505 | ESTs | 268 | 3.5 | 96.4 |
| 39 | AA476258 | ESTs | 269 | 3.5 | 87.5 |
| 40 | N91990 | phytanoyl-CoA hydroxylase (Refsum disease) | 270 | 3.5 | 88.0 |
| 41 | T98253 | ESTs | 271 | 3.5 | 93.1 |
| 42 | W84868 | cytochrome P450, subfamily IVA, polypeptide 11 | 272 | 3.4 | 84.6 |
| 43 | H05140 | regucalcin (senescence marker protein-30) | 273 | 3.4 | 85.7 |
| 44 | H09818 | ESTs | 274 | 3.4 | 82.6 |
| 45 | W01048 | ESTs | 275 | 3.3 | 77.8 |
| 46 | AI289110 | metallothionein 1L | 276 | 3.3 | 82.8 |
| 47 | H77535 | ESTs, Weakly similar to choline kinase isolog | 277 | 3.3 | 83.3 |
| | | 384D8_3 [H. sapiens] | | | |
| 48 | T60160 | ESTs, Moderately similar to MM46 [H. sapiens] | 278 | 3.3 | 89.7 |
| 49 | H14604 | ESTs, Weakly similar to C. elegans cDNA yk30b3.5 | 279 | 3.3 | 79.2 |
| 50 | T98394 | Solute carrier family 7 (cationic amino acid | 280 | 3.3 | 85.7 |
| | | transporter, y+ system), member 7 | | | |
| 51 | H48148 | ESTs, Weakly similar to AIF-1 [H. sapiens] | 281 | 3.3 | 79.3 |
| 52 | AA453783 | Homo sapiens mRNA; cDNA DKFZp564B1264 | 282 | 3.3 | 82.1 |
| | | (from clone DKFZp564B1264) | | | |
| 53 | T69767 | hydroxyacyl-coenzyme A dehydrogenase/3-ketoacyl- | 283 | 3.2 | 84.0 |
| | | coenzyme A thiolase/enoyl-coenzyme A | | | |
| | | hydratase (trifunctional protein), β subunit | | | |
| 54 | AA446650 | Homo sapiens mRNA; cDNA DKFZp586M0723 | 284 | 3.2 | 75.0 |
| | | (from clone DKFZp586M0723) | | | |
| 55 | AA416875 | ESTs | 285 | 3.2 | 95.7 |
| 56 | R54850 | biphenyl hydrolase-like (serine hydrolase; | 286 | 3.2 | 85.7 |
| | | breast epithelial mucin-associated antigen) | | | |
| 57 | AA775957 | ATPase, Na+/K+ transporting, α 3 polypeptide | 287 | 3.2 | 93.1 |
| 58 | AA455222 | plasminogen activator, urokinase receptor | 288 | 3.2 | 77.8 |
| 59 | AA406266 | ESTs | 289 | 3.1 | 84.6 |
| 60 | N26658 | ESTs, Moderately similar to TGF-β Receptor | 290 | 3.1 | 82.1 |
| | | type III precursor [H. sapiens] | | | |
| 61 | AA455969 | prion protein (p27-30) (Creutzfeld-Jakob disease, | 291 | 3.1 | 89.7 |
| | | Gerstmann-Strausler-Scheinker syndrome, | | | |
| | | fatal familial insomnia) | | | |
| 62 | N70794 | acyl-Coenzyme A dehydrogenase, C-4 to | 292 | 3.1 | 79.3 |
| | | C-12 straight chain | | | |
| 63 | AA463454 | ESTs, [H. sapiens] | 293 | 3.1 | 82.1 |
| 64 | H23187 | carbonic anhydrase II | 294 | 3.0 | 79.3 |
| 65 | AA205598 | ESTs | 295 | 3.0 | 89.3 |
| 66 | AA670438 | ubiquitin carboxyl-terminal esterase L1 | 296 | 3.0 | 75.9 |
| | | (ubiquitin thiolesterase) | | | |
| 67 | AA121668 | pigment epithelium-derived factor | 297 | 3.0 | 86.2 |
| 68 | AA487346 | cathepsin H | 298 | 3.0 | 92.0 |
| 69 | W84701 | solute carrier family 7 (cationic amino acid | 299 | 2.9 | 77.8 |
| | | transporter, y+ system), member 8 | | | |
| 70 | AA456022 | ESTs, weakly similar to unknown [H. sapiens] | 300 | 2.9 | 81.5 |
| 71 | AA424905 | ESTs | 301 | 2.9 | 86.2 |
| 72 | W87747 | ESTs | 302 | 2.9 | 78.3 |
| 73 | R76614 | ESTs | 303 | 2.9 | 78.3 |
| 74 | AA132964 | ESTs | 304 | 2.9 | 78.6 |
| 75 | AA169798 | biphenyl hydrolase-like (serine hydrolase; | 305 | 2.8 | 86.2 |
| | | breast epithelial mucin-associated antigen) | | | |
| 76 | H15504 | Annexin A7 | 306 | 2.8 | 85.2 |
| 77 | H22856 | Glutamic-oxaloacetic transaminase 1, | 307 | 2.8 | 82.1 |
| | | soluble (aspartate aminotransferase 1) | | | |
| 78 | AA429946 | ESTs, Highly similar to peroxisomal short-chain | 308 | 2.8 | 82.8 |
| | | alcohol dehydrogenase [H. sapiens] | | | |
| 79 | R93551 | aldehyde dehydrogenase 5 | 309 | 2.8 | 85.7 |
| 80 | AA256123 | fragile histidine triad gene | 310 | 2.8 | 81.8 |
| 81 | AA621183 | solute carrier family 5 (inositol transporters), member 3 | 311 | 2.8 | 76.0 |
| 82 | R67147 | crystallin, μ | 312 | 2.8 | 76.0 |
| 83 | AA156988 | iron-responsive element binding protein 1 | 313 | 2.7 | 78.6 |
| 84 | AA459668 | 3-hydroxyisobutyryl-coenzyme A hydrolase | 314 | 2.7 | 75.9 |
| 85 | N46098 | biphenyl hydrolase-like (serine hydrolase; breast | 315 | 2.6 | 77.8 |
| | | epithelial mucin-associated antigen) | | | |
| 86 | W81371 | ESTs | 316 | 2.6 | 75.9 |
| 87 | H99883 | KIAA0828 protein | 317 | 2.6 | 79.2 |
| 88 | N65985 | ESTs | 318 | 2.6 | 75.9 |
| 89 | AA400258 | Human DNA sequence from clone 215D11, | 319 | 2.5 | 75.0 |
| | | chromosome 1p36 12-36.33 Contains a gene for | | | |
| | | a RNA-binding protein regulatory subunit, gene similar | | | |
| | | to rat gene 33, pseudogene similar to PLA-X, | | | |
| | | ESTs, STSs, GSSs and CpG islands | | | |
| 90 | AA456595 | ESTs | 320 | 2.5 | 78.3 |
| 91 | N31492 | flavin containing monooxygenase 4 | 321 | 2.5 | 75.0 |
| 92 | R28294 | glycine cleavage system protein H (aminomethyl carrier) | 322 | 2.5 | 85.7 |
| 93 | AA430382 | nucleoside phosphorylase | 323 | 2.5 | 82.8 |
| 94 | AA521401 | pyruvate dehydrogenase (lipoamide) β | 324 | 2.4 | 78.6 |
| 95 | AA453691 | Aminolevulinate, delta-, synthase 1 | 325 | 2.4 | 75.9 |
| 96 | N99256 | ESTs | 326 | 2.4 | 80.0 |
| 97 | AA448184 | ubiquinol-cytochrome c reductase, | 327 | 2.4 | 75.9 |
| | | Rieske iron-sulfur polypeptide 1 | | | |
| 98 | AA056390 | RD RNA-binding protein | 328 | 2.4 | 81.5 |
| 99 | H78368 | ESTs | 329 | 2.3 | 76.9 |
| 100 | AA432268 | ESTs | 330 | 2.3 | 75.9 |
| 101 | AA453679 | Dihydrolipoamide dehydrogenase (E3 | 331 | 2.3 | 75.9 |
| | | component of pyruvate dehydrogenase complex, | | | |
| | | 2-oxo-glutarate complex, branched chain keto | | | |
| | | acid dehydrogenase complex) | | | |

*The values in this column are the % of CC-RCC patients in whom a given gene was expressed at least 2-fold lower compared to control kidney tissue. Genes included in this Table met or exceeded this threshold in at least 75% of CC-RCC patients (but did not exceed the threshold of 3 fold down-regulation in this percentage of patients

[0170] TABLE 6A and 6B
First Set of Genes Differentially Expressed in Aggressive
vs. Non-aggressive type CC-RCC

| | | | | |
|---|---|---|---|---|
| GENBANK | | SEQ | | |
| ACCESSION # | NAME (FROM RESEARCH GENETICS) | ID NO: | CELERA # | E VALUE |

TABLE 6A
Genes upregulated in non aggressive CC-RCC

| | | | | | |
|---|---|---|---|---|---|
| 1 | N35086 | FYN oncogene related to Src, Fgr, Yes | 1 | hCG34806 | 0 |
| 2 | N66144 | | 1 | hCG34806 | 10⁻¹⁵³ |
| 3 | T47312 | Insulin receptor | 2 | hCG21793 | 10⁻¹⁸⁰ |
| 4 | AA001614 | | 2 | hCG21793 | 10⁻¹¹⁴ |
| 5 | T80232 | phosphodiesterase I/nucleotide | 3 | hCG21270 | 10⁻¹⁰⁰ |
| | | pyrophosphatase 2 (autotaxin) | | | |
| 6 | AA490694 | Hevin | 4 | hCG38543 | 4 × 10⁻⁷⁸ |
| 7 | | | 5 | | |
| 8 | AA486082 | serum/glucocorticoid regulated kinase | 6 | hCG32737 | 8 × 10⁻⁹⁹ |
| 9 | W60845 | cell division cycle 42 (GTP-binding protein) | 7 | hCG15193 | 10⁻¹³⁸ |
| 10 | N34362 | regulator of G-protein signalling 5 | 7 | hCG15193 | 0 |
| 11 | AA668470 | | 7 | hCG15193 | 0 |
| 12 | H84815 | Rab9 effector p40 | 8 | hCG29658 | 10⁻¹⁵⁵ |
| 13 | AA669136 | transcription factor 4 | 9 | hCG22018 | 10⁻¹²⁷ |
| 14 | N39240 | ESTs | 9 | hCG22018 | 0 |
| 15 | W72803 | ESTs, weakly similar to KIAA0768 protein | 10 | hCG28803 | 0.081 |
| 16 | R22412 | platelet/endothelial cell adhesion molecule | 11 | hCG40093 | 10⁻¹² |
| 17 | R56211 | platelet-derived growth factor receptor, β polypeptide | 12 | hCG16146 | 0.99 |
| 18 | H74106 | LIM binding domain 2 | 13 | hCG40704 | 0 |
| 19 | H72113 | CD34 antigen | 14 | hCG21280 | 10⁻¹⁵³ |
| 20 | AA680300 | H. sapiens clone 23698 mRNA | | | |
| 21 | R32440 | | 15 | hCG17031 | 10⁻¹¹² |
| 22 | AA777910 | H. sapiens clone 23698 mRNA | 139 | no list | |
| 23 | | | 16 | | |
| 24 | AA432292 | ESTs | 17 | hCG29296 | 0.26 |
| 25 | AA055440 | Sprouty (Drosophila) homolog 1, antagonist of FGF signal | 18 | hCG28465 | 0.012 |
| 26 | H68922 | Integrin, α1 | 19 | hCG23896 | 0.08 |
| 27 | N29914 | Endothelin receptor type B | 20 | hCG32240 | 10⁻¹¹¹ |
| 28 | | | 21 | | |

TABLE 6B
Genes downregulated in aggressive CC-RCC

| | | | | | |
|---|---|---|---|---|---|
| 29 | AA775447 | α-2-macroglobulin | 22 | hCG25215 | 7 × 10⁻⁶⁷ |
| 30 | H99415 | a kinase (PRKA) anchor protein 2 | 23 | hCG28766 | 10⁻¹⁵⁸ |
| 31 | N51499 | | 23 | hCG28766 | 0 |
| 32 | AA464644 | LIM domain only 2 (rhombotin-like 1) | 24 | hCG26502 | 0 |
| 33 | N74956 | DNA-directed RNA polymerase II B (140 kD) | 25 | hCG201171 | 3 × 10⁻⁴⁵ |
| 34 | T53298 | insulin-like growth factor binding protein 7 | 25 | hCG201171 | 5 × 10⁻¹⁵ |
| 35 | AA704965 | ESTs | 26 | hCG41053 | 0.018 |
| 36 | AA099153 | tissue inhibitor of metalloproteinase 3 (TIMP) | 27 | hCG41415 | 10⁻¹⁷⁴ |
| 37 | N95226 | KIAA0758 | 28 | hCG18763 | 0 |
| 38 | T63971 | | 28 | hCG18763 | 10⁻¹²¹ |
| 39 | AA189106 | KIAA1102 | 29 | hCG33090 | 0 |
| 40 | R23270 | | 29 | hCG33090 | 10⁻¹⁰⁴ |
| 41 | N36136 | ESTs, moderately similar to endomucin | 30 | hCG39439 | 0 |
| 42 | N93505 | Transmembrane 4 superfamily member 2 | 31 | hCG18324 | 10⁻¹⁶⁰ |
| 43 | AA173408 | ESTs | 32 | hCG37431 | 10⁻¹⁰⁹ |
| 44 | T71976 | Phosphatidic acid phosphatase type 2b | 33 | hCG32470 | 0 |
| 45 | T72119 | | 33 | hCG32470 | 10⁻¹⁵⁴ |
| 46 | AA487034 | Transforming growth factor β receptor II (70-80 kD) | 34 | hCG26855 | 10⁻¹²⁷ |
| 47 | W68396 | KIAA0096 | 35 | hCG26802 | 10⁻¹²⁷ |
| 48 | N57594 | H. sapiens mRNA; cDNA DKFZp564E153 | 36 | hCG41872 | 0.98 |
| 49 | N94344 | H. sapiens mRNA; cDNA DKFZp564E153 | 37 | hCG15077 | 0.005 |
| 50 | W47641 | H. sapiens mRNA; cDNA DKFZp564E153 | 38 | hCG25175 | 1.4 |
| 51 | AA458653 | H. sapiens mRNA for GS3955, complete cds | 39 | hCG15902 | 2 × 10⁻⁹⁴ |

[0171] TABLE 7
Second Set of Genes (166) Differentially Expressed in Aggressive vs. Non-aggressive type CC-RCC

| | GENBANK | | SEQ |
|---|---|---|---|
| | ACCESSION # | NAME | ID NO: |
| 1 | H23081 | Zinc finger protein 264 | 332 |
| 2 | N25425 | v-raf-1 murine leukemia viral oncogene homologue 1 | 333 |
| 3 | AA670438 | Ubiquitin carboxyl-terminal esterase L1 (ubiquitin thiolesterase) | 334 |
| 4 | AA453273 | U6 snRNA-associated Sm-like protein | 335 |
| 5 | AA405748 | U2 small nuclear ribonucleoprotein auxiliary factor (65 kD) | 336 |
| 6 | AA432062 | Tyrosine kinase with immunoglobulin and epidermal growth factor homology domains | 337 |
| 7 | R06309 | Tumor protein D52-like 2 | 338 |
| 8 | R36467 | Transforming growth factor, β 1 | 339 |
| 9 | H50377 | Tight junction protein 1 (zona occludens 1) | 340 |
| 10 | AA778098 | Thymidine kinase 1, soluble | 341 |
| 11 | H05577 | Splicing factor 30, survival of motor neuron-related | 342 |
| 12 | AA018591 | Spectrin, β, non-erythrocytic 1 | 343 |
| 13 | R66139 | Small inducible cytokine subfamily D (Cys-X3-Cys), member 1 (fractalkine, neurotactin) | 344 |
| 14 | R96668 | Small inducible cytokine subfamily A (Cys-Cys), member 14 | 345 |
| 15 | N64837 | SFRS protein kinase 1 | 346 |
| 16 | AA070226 | Selenoprotein P, plasma, 1 | 347 |
| 17 | W96107 | Sec61 γ | 348 |
| 18 | R55105 | Sarcoglycan, β (43 kD dystrophin-associated glycoprotein)″ | 349 |
| 19 | N93715 | Ribosomal protein S29 | 350 |
| 20 | AA991856 | Ribophorin II | 351 |
| 21 | AA479781 | Radixin | 352 |
| 22 | AA464152 | Quiescin Q6 | 353 |
| 23 | AA151249 | Protoporphyrinogen oxidase | 354 |
| 24 | R79082 | protein tyrosine phosphatase, receptor type, K | 355 |
| 25 | AI022531 | protein tyrosine phosphatase, receptor type, β polypeptide | 356 |
| 26 | AA490696 | protein phosphatase 2 (formerly 2A), catalytic subunit, β isoform | 357 |
| 27 | AA916327 | protective protein for β-galactosidase (galactosialidosis) | 358 |
| 28 | AA455193 | proteasome (prosome, macropain) 26S subunit, non-ATPase, 2 | 359 |
| 29 | AA426212 | procollagen-proline, 2-oxoglutarate 4-dioxygenase (proline 4-hydroxylase), β polypeptide (protein disulfide | 360 |
| | | isomerase; thyroid hormone binding protein p55) | |
| 30 | AA488432 | phosphoserine phosphatase | 361 |
| 31 | AA402874 | phospholipid transfer protein | 362 |
| 32 | AA699876 | phosphoinositide-3-kinase, class 2, β polypeptide | 363 |
| 33 | AA629987 | peptidylprolyl isomerase D (cyclophilin D) | 364 |
| 34 | AA488969 | PDZ domain containing guanine nucleotide exchange factor(GEF)1; RA(Ras/Rap1A-associating)-GEF | 365 |
| 35 | AA845432 | parathyroid hormone-like hormone | 366 |
| 36 | AA446301 | paraoxonase 2 | 367 |
| 37 | AA451781 | novel RGD-containing protein | 368 |
| 38 | H83225 | Novel gene on chromosome 20 | 369 |
| 39 | AA709414 | nidogen (enactin) | 370 |
| 40 | N30706 | neuralized (Drosophila)-like | 371 |
| 41 | AA491124 | NAD(P)H menadione oxidoreductase 2, dioxin-inducible | 372 |
| 42 | R44617 | MyoD family inhibitor | 373 |
| 43 | R59167 | Meis (mouse) homolog 2 | 374 |
| 44 | AA155913 | matrix Gla protein | 375 |
| 45 | R39273 | MAD (mothers against decapentaplegic, Drosophila) homolog 4 | 376 |
| 46 | AA668531 | leucocyte vacuolar protein sorting 45 | 377 |
| 47 | AA459106 | kinectin 1 (kinesin receptor) | 378 |
| 48 | N70078 | KIAA1058 protein | 379 |
| 49 | H60026 | KIAA0745 protein | 380 |
| 50 | AA455507 | KIAA0618 gene product | 381 |
| 51 | AA702698 | KIAA0414 protein | 382 |
| 52 | AA284634 | Janus kinase 1 (a protein tyrosine kinase) | 383 |
| 53 | R70685 | Jagged1 (Alagille syndrome) | 384 |
| 54 | AA683550 | interleukin-1 receptor-associated kinase 1 | 385 |
| 55 | AA148200 | integrin-linked kinase | 386 |
| 56 | N74131 | Human secretory protein (P1.B) mRNA, complete cds″ | 387 |
| 57 | AA487681 | Human mRNA for ornithine decarboxylase antizyme, ORF 1 and ORF 2 | 388 |
| 58 | AA931758 | Human G0S2 protein gene, complete cds | 389 |
| 59 | AA418914 | Human DNA sequence from clone 30M3 on chromosome 6p22.1-22.3. Contains three novel genes, one similar | 390 |
| | | to C. elegans Y63D3A.4 and one similar to (predicted) plant, worm, yeast and archaea bacterial genes, and the | |
| | | first exon of the KIAA0319 gene. Co | |
| 60 | AA480820 | Human 1.1 kb mRNA upregulated in retinoic acid treated HL-60 neutrophilic cells | 391 |
| 61 | AA401736 | Human ubiquitously-expressed transcript (UXT) mRNA | 392 |
| 62 | N73309 | Human signal sequence receptor, γ (translocon-associated protein γ (SSR3), mRNA | 393 |
| 63 | T70352 | Homo sapiens mRNA; cDNA DKFZp564O222 (from clone DKFZp564O222) | 394 |
| 64 | AA664020 | Homo sapiens mRNA; cDNA DKFZp564M0763 (from clone DKFZp564M0763) | 395 |
| 65 | N55339 | Homo sapiens mRNA; cDNA DKFZp564H1916 (from clone DKFZp564H1916) | 396 |
| 66 | N58145 | Homo sapiens lipoma HMGlC fusion partner (LHFP) mRNA | 397 |
| 67 | N27165 | Homo sapiens clone 24582 mRNA sequence | 398 |
| 68 | T98002 | Homo sapiens chromosome 19, cosmid F22329 | 399 |
| 69 | AA700688 | Homo sapiens ATP synthase, H+ transporting, mitochondrial F1 complex, ε subunit (ATP5E), nuclear gene | 400 |
| | | encoding mitochondrial protein, mRNA | |
| 70 | T41173 | Homo sapiens a disintegrin-like and metalloprotease (reprolysin type) with thrombospondin type 1 motif, 1 | 401 |
| | | (ADAMTS1), mRNA | |
| 71 | AA873089 | H. sapiens DNA for cyp related pseudogene | 402 |
| 72 | AA487912 | guanine nucleotide binding protein (G protein), β polypeptide 1 | 403 |
| 73 | AA629909 | glycyl-tRNA synthetase | 404 |
| 74 | AA122287 | glycoprotein A repetitions predominant | 405 |
| 75 | AA152347 | glutathione S-transferase A4 | 406 |
| 76 | AA444009 | glucosidase, α; acid (Pompe disease, glycogen storage disease type II) | 407 |
| 77 | AA878899 | galactosidase, β 1 | 408 |
| 78 | N22980 | FYN oncogene related to SRC, FGR, YES | 409 |
| 79 | AA865707 | fibrinogen, A α polypeptide | 410 |
| 80 | AA679352 | farnesyl-diphosphate farnesyltransferase 1 | 411 |
| 81 | AA677650 | ESTs, Weakly similar to similar to coiled-coil protein [C. elegans] | 412 |
| 82 | AA464143 | ESTs, Weakly similar to RNA polymerase II elongation factor ELL2 [H. sapiens] | 413 |
| 83 | AA098892 | ESTs, Weakly similar to R12E2.12 [C. elegans] | 414 |
| 84 | N76361 | ESTs, Weakly similar to putative Rho/Rac guanine nucleotide exchange factor [H. sapiens] | 415 |
| 85 | AA778640 | ESTs, Weakly similar to leucine aminopeptidase [H. sapiens] | 416 |
| 86 | AA488171 | ESTs, Weakly similar to formin 4 [M. musculus] | 417 |
| 87 | AA449345 | ESTs, Weakly similar to F48E8.2 [C. elegans] | 418 |
| 88 | W73797 | ESTs, Weakly similar to Containing ATP/GTP-binding site motif A (P-loop) similar to C. elegans | 419 |
| | | protein(P1: CEC47E128); similar to mouse α-mannosidase(P1: B54407) [H. sapiens] | |
| 89 | R67283 | ESTs, [H. sapiens] | 420 |
| 90 | AA706829 | ESTs, Moderately similar to putative Rab5-interacting protein {clone L1-57} [H. sapiens] | 421 |
| 91 | AA446651 | ESTs, Moderately similar to Kryn [M. musculus] | 422 |
| 92 | R16957 | ESTs, Highly similar to Jκ recombination signal binding protein [H. sapiens] | 423 |
| 93 | AA149204 | ESTs, Highly similar to growth arrest inducible gene product [H. sapiens] | 424 |
| 94 | H73484 | ESTs, Highly similar to CGI-106 protein [H. sapiens] | 425 |
| 95 | AA011593 | ESTs, Highly similar to cell adhesion regulator [R. norvegicus] | 426 |
| 96 | AA460005 | ESTs, Highly similar to antigen NY-CO-33 [H. sapiens] | 427 |
| 97 | AA416627 | ESTs | 428 |
| 98 | N80361 | ESTs | 429 |
| 99 | AA279648 | ESTs | 430 |
| 100 | N49774 | ESTs | 431 |
| 101 | R45672 | ESTs | 432 |
| 102 | AA463189 | ESTs | 433 |
| 103 | AA418040 | ESTs | 434 |
| 104 | N34799 | ESTs | 435 |
| 105 | AA030013 | ESTs | 436 |
| 106 | N36098 | ESTs | 437 |
| 107 | N72847 | ESTs | 438 |
| 108 | R16545 | ESTs | 439 |
| 109 | R91821 | ESTs | 440 |
| 110 | AA101971 | ESTs | 441 |
| 111 | T52564 | ESTs | 442 |
| 112 | AA455962 | ESTs | 443 |
| 113 | W69216 | ESTs | 444 |
| 114 | N66734 | ESTs | 445 |
| 115 | N89738 | ESTs | 446 |
| 116 | W84486 | ESTs | 447 |
| 117 | AA464603 | ESTs | 448 |
| 118 | W31683 | ESTs | 449 |
| 119 | AA126673 | ESTs | 450 |
| 120 | AA664044 | ESTs | 451 |
| 121 | AA149640 | ESTs | 452 |
| 122 | AA436184 | ESTs | 453 |
| 123 | N24042 | ESTs | 454 |
| 124 | AA290631 | ESTs | 455 |
| 125 | AA150505 | ESTs | 456 |
| 126 | AA009755 | ESTs | 457 |
| 127 | AA452118 | ESTs | 458 |
| 128 | AA452165 | ESTs | 459 |
| 129 | N32226 | ESTs | 460 |
| 130 | N92478 | ESTs | 461 |
| 131 | N46849 | ESTs | 462 |
| 132 | AA460463 | ESTs | 463 |
| 133 | T95200 | ESTs | 464 |
| 134 | AA454008 | ESTs | 465 |
| 135 | H99766 | ESTs | 466 |
| 136 | AA191322 | ESTs | 467 |
| 137 | AA701521 | ESTs | 468 |
| 138 | H41160 | ESTs | 469 |
| 139 | AA455094 | ESTs | 470 |
| 140 | AA284245 | ESTs | 471 |
| 141 | AA197344 | ESTs | 472 |
| 142 | R62868 | erythrocyte membrane protein band 7.2 (stomatin) | 473 |
| 143 | AA052960 | Dyskeratosis congenita 1, dyskerin | 474 |
| 144 | AA621202 | DKFZP586D1519 protein | 475 |
| 145 | AA496996 | DKFZP564F0522 protein | 476 |
| 146 | AA447502 | DKFZP564B147 protein | 477 |
| 147 | AA704226 | DKFZP434G162 protein | 478 |
| 148 | R07560 | Deoxyguanosine kinase | 479 |
| 149 | AA629999 | Cytochrome c oxidase subunit VIIb | 480 |
| 150 | AA486312 | Cyclin-dependent kinase 4 | 481 |
| 151 | AA292226 | Creatine transporter [human, brainstem/spinal cord, mRNA, 2283 nt] | 482 |
| 152 | AA150402 | Collagen, type IV, α 1 | 483 |
| 153 | AA476282 | Coated vesicle membrane protein | 484 |
| 154 | W81562 | Cell division cycle 42 (GTP-binding protein, 25 kD) | 485 |
| 155 | W81563 | Cell division cycle 42 (GTP-binding protein, 25 kD) | 486 |
| 156 | AA043228 | Calponin 3, acidic | 487 |
| 157 | R76554 | Calmodulin 1 (phosphorylase kinase, delta) | 488 |
| 158 | AA487552 | Calcium binding atopy-related autoantigen 1 | 489 |
| 159 | AA757351 | Calcitonin receptor-like | 490 |
| 160 | AA456480 | BCL2-like 2 | 491 |
| 161 | H14372 | ATP-binding cassette, sub-family A (ABC1), member 5 | 492 |
| 162 | H38623 | ATP synthase, H+ transporting, mitochondrial F0 complex, subunit f, isoform 2 | 493 |
| 163 | AA046701 | ATP synthase, H+ transporting, mitochondrial F0 complex, subunit c (subunit 9), isoform 1 | 494 |
| 164 | AA633658 | Amyloid β (A4) precursor protein (protease nexin-II, Alzheimer disease) | 495 |
| 165 | W42849 | Amyloid β (A4) precursor protein (protease nexin-II, Alzheimer disease) | 496 |
| 166 | N72918 | Adaptor-related protein complex 2, β 1 subunit | 497 |

### EXAMPLE IV

### Molecular Heterogeneity in CC-RCC

[0172] Having identified common alterations in gene expression in CC-RCC tissue, the inventors next sought to identify DNA expression patterns that account for the heterogeneity in the clinical behavior of the disease. Some of the tumors were highly aggressive, leading to patients' deaths within three years, while other patients had no recurrences following surgery (Table 1). The present inventors thus sought to discover gene expression signatures that could identify, predict and possibly account for the lethal tumor phenotype.

[0173] A number of methods have been employed to identify DNA expression profiles that were correlated with some observable phenotype or property of cells or tissue. Ahizadeh et al. (supra) performed hierarchical clustering and then searched for selectively expressed groups, while Golub et al. (supra) and others ranked individual DNAs based on their ability to classify patients (Science (2000) 286:531-7). As discussed in Hastie et al., (GenomeBiology.com (2001) 2, RESEARCH0003), the present strategy called for, first, clustering the DNAs and then assessing the subclusters' ability to differentiate patients. This approach allows exploitation of the value of correlated sets of DNAs and takes advantage of a systematic, mathematical test. The present inventors also performed individual DNA permutation analysis to generate statistical significance values for the ability to make a classification based on an individual DNA.

[0174] The inventors compared the expression profiles using a selected set of 3,184 polynucleotides that registered expression ratios greater than 2 (up-or down-regulated) in at least 2 tumors (where results were consistently present in at least 75% of the experiments).

[0175] The data was median polished, organized, and visualized using average-linkage hierarchical clustering (Eisen, M B. et al., (1998) Proc Natl Acad Sci USA 95:14863-4868) (FIG. 6A/FIG. 1). This method arranges DNAs and patients according to similarity in pattern of expression. Many distinct trends in expression were identified by organization of the color patterns in the matrix. However, visual discernment of which clusters are most relevant biologically and clinically was cumbersome.

[0176] To circumvent a manual investigation of the correlation between each sub-cluster of DNAs and each clinical parameter, the inventors implemented the program CLUSTERFINDER described above. This program scores and identifies groups of clustered DNAs (nodes in the dendrogram) that best differentiate patients based on a known clinical distinction. The analysis was biased toward highly correlated DNA clusters by scoring only clusters with >10 DNAs and correlation coefficients >0.5.

[0177] The inventors tested two clinical parameters corresponding to two hypotheses of tumor progression. First, “tumor staging” was used as the discriminating clinical parameter, under the assumption that gene expression profiles change as a tumor progresses. The tumors were divided into two groups: (1) stage I and II and (2) stage III and IV. Surprisingly, this distinction did not correlate strongly with any subclusters within the DNA expression matrix.

[0178] Second, the inventors used “patient outcome” as the discriminating parameter, under the hypothesis that multiple classes of CC-RCC exist, each having a distinct molecular profile that would correspond to clinical course. For this operation, the inventors distinguished between those patients that died due to cancer within 5 years of initial diagnosis, and those that survived cancer-free for >5 years (Table 1). Also included in the “poor outcome” class were two patients who survived with cancer for 89.4 and 105.6 months. For this “patient outcome” parameter, multiple clusters of DNAs distinguished classes of patients. Cluster 687, containing 24 DNAs, and its parent, Cluster 1281, containing 51 DNAs, had the highest predictive scores (1.70). Cluster 3014, with 48 DNAs, and cluster 2199, with 61 DNAs, also had strong predictive scores (1.46, 1.011).

[0179] FIGS. 6B, 6C and FIGS. 2A, 2B, 3A, 3B, 4A and 4B depict the re-clustering of patients based on these subclusters. Cluster 1281 displays marked separation of the two classes of patients, with the exception of patient 30. Cluster 3014 also separates the patients well, although expression values within this cluster did not correlate as highly.

[0180] The significance of this underlying molecular profile was confirmed using a modified permutation t-test. 217 DNAs differentiated the two outcome groups significantly (α<0.001). All 51 DNAs within Cluster 1281 (see also Table 6) were present in this group of 217 DNAs (Table 6 +Table 7).

[0181] Thus, Table 6 shows the 51 sequences of greatest interest in their ability to distinguish between the two clinical types of CC-RCC discerned by the present inventors: aggressive and non-aggressive. Table 6A shows 28 genes (SEQ ID NO:1-21 and SEQ ID NO:139) whose expression is upregulated non-aggressive cases of CC-RCC (tumor compared to normal tissue). In contrast, Table 6B lists 23 genes (apparently 19 unique sequences designated SEQ ID NO:22-39) that are down-regulated in aggressive CC-RCC (tumor tissue relative to normal kidney tissue). On the basis of these expression patterns of as few as 1 gene and as many as all 51 gene probes (apparently 39 or 40 unique sequences; SEQ ID NO:1-39 and SEQ ID NO:139), it is possible to obtain a molecular classification of CC-RCC into the two clinically distinct classes. This serves as the basis of an routine molecular prognostic assay that can be done to classify CC-RCC patients and tailor their therapy and follow-up programs in accordance with their prognosis.

### EXAMPLE V

### Clinical Simulation

[0182] These discriminating clusters of DNAs have at least two applications: providing insight into potential molecular subtypes of CC-RCC, and as a means for objective and accurate determination of patient prognosis. To address the second, the present inventors performed a clinical simulation. Because the DNAs in these identified clusters were ordered using the molecular profiles of the 29 patients, testing the predictive ability of these DNAs on the same 29 patients would be biased. To remove this bias, each patient's data was systematically treated as if it came from an unknown test patient who had just undergone nephrectomy and a molecular profile screening with the present cDNA probe set, while the remaining 28 patients served to populate the database of known molecular profiles/clinical follow-up data. The same analysis protocol described above was followed independently of the test patient.

[0183] A flow diagram of the simulation process is shown below.

[0184] By sequential removal of any individual patient (being treated as an “unknown”) from the clusters, the clustering of DNAs was slightly altered so that the clusters were no longer identical in structure to the originally predictive clusters. Throughout this simulation, the set of DNAs identified as Cluster 1281 consistently clustered together, as expected from their high correlation index in the original clustering operation. Although a few DNAs appeared in this grouping sporadically, on average, 95% of the DNAs in the original cluster were also present in the simulation clusters identified by CLUSTERFINDER However, DNAs in the other previously identified clusters did not maintain their order during the simulation. This follows from the fact that these other clusters did not have as high correlation indices in the original operation.

[0185] Since the clusters containing DNAs similar to Cluster 1281 maintained high predictive scores and consistent DNA content throughout the simulation, the inventors used these as predictive tests for the respective “test” patients. The test patient's prognosis was predicted by comparing his profile with that of the independently established predictive cluster (i.e., from which the “test” patient's data had been removed).

[chemical structure]

[0186] Remarkably, the clusters of DNAs similar to those in Cluster 1281 independently permitted correct prediction of patient outcomes correctly in all but one case. This one prediction failure was a patient with advanced stage cancer who survived >5 years. The test never failed to predict patients with poor outcomes. The comparison of patient prognosis based on staging vs. molecular profiling is presented in the two rightmost columns of Table 1.

### EXAMPLE VI

### Content of DNAs in the Predictive Cluster

[0187] Since the DNAs within Cluster 1281 proved predictive and stable throughout the simulation, the inventors investigated the DNAs within this cluster and their potential implication in the biology of the highly aggressive sub-type of CC-RCC.

[0188] Tables 2 and 3 present a subset of 123 genes that are generally up-regulated in CC-RCC tissue versus normal kidney tissue. Table 2 shows the most consistently and/or strongly upregulated “first” (most preferred) subset of genes (SEQ ID NO: 40-68). These genes are up-regulated at least 3-fold in 75% or more of the CC-RCC patients. Table 3 shows a second set of 91 up-regulated genes (SEQ ID NO:140-230) which are up-regulated at least 2-fold in 75% or more of the CC-RCC patients.

[0189] Tables 4 and 5 present a subset of 178 genes that are down-regulated in CC-RCC tissue versus normal kidney tissue. Table 4 shows the 77 most consistently and/or strongly down-regulated “first” (most preferred) subset of genes (SEQ ID NO:69-138). These genes are down-regulated by at least 3-fold in 75% or more of the CC-RCC patients. Table 5 shows a second set of 101 down-regulated genes (SEQ ID NO:231-331) that are down-regulated by at least 2-fold in 75% or more of the CC-RCC patients.

[0190] The gene products (taken from serum, urine, saliva, or other abundant body fluid rather than kidney tissue) of the up-regulated expressed nucleic acids (Tables 2 and 3) can be assayed using in immunoassays known in the art (i.e., ELISA, immunocytochemistry, sandwich assays, etc.) for the purpose of diagnosing patients with CC-RCC but do not discriminating between the heterogeneous disease severity.

[0191] Differentially expressed nucleic acids indicative of aggressive versus non-aggressive disease phenotype are not included in this subset but were independently determined by the inventors through clustering and t-statistics. The list of expressed nucleic acids discovered to be indicative are summarized in FIG. 6A and Tables 6 and 7. FIG. 5 represents the actual relative expression values for the 51 cDNAs that comprise Cluster 1281. (See also Table 6.) The inventors have shown that these 51cDNAs are down regulated in the aggressive CC-RCC phenotype (SEQ ID NO:22-39) or up-regulated in non-aggressive CC-RCC (SEQ ID NO: 1-21 and 139). A larger set of genes that are differentially expressed in aggressive vs. non-aggressive CC-RCC includes the 166 probes SEQ ID NO:332-497, inclusive. It is not yet clear how these genes break down into the two categories so far identified in these prognostic genes.

[0192] These two classes of gene can be viewed as
[0193] (A) positive effectors of less aggressive CC-RCC; and
[0194] (13) inhibitors of tumor progression that would keep less aggressive CC-RCC in check.
   For example PDGFR expression was said to be an indicator of proliferation in other cancers (Lafuente, et al. (1999) J Mol Neurosci 13:177-85) while sprouty homologue 1 (D. melanogaster) negatively modulates angiogenesis by inhibiting tyrosine kinase-mediated signaling pathways (Lee, S H et al. (2000) J Biol Chem 26:26) such as the VEGF pathway. It is noteworthy that VEGF was highly up regulated in all CC-RCC cases tested.

[0195] The DNAs in Group II are almost exclusively down regulated in the highly aggressive CC-RCC cases. This group includes TGFβRII, TIMP3, and insulin-like growth factor binding protein 7 (IGF-BP7). All of these genes/proteins have been implicated in late-stage or aggressive cancer.

### EXAMPLE VII

### Expression of Specific Genes in CC-RCC

[0196] Ceruloplasmin, a protein involved in iron and copper homeostasis, had the highest increase in expression in CC-RCC vs. normal tissue. Interestingly, only a handful of reports showed an association between ceruloplasmin and CC-RCC. One study reported secretion of this protein by CC-RCC (Saito, K., et al. (1985) Biochem Med 33:45-52) and the other reported its elevation in RCC patient serum (Pejovic, M. et al. (1997) Int Urol Nephrol 29:427-32). The present discovery merits an in-depth investigation of ceruloplasmin's role in CC-RCC tumorigenesis and its potential value as a tumor marker.

[0197] Another copper-related protein, lysyl oxidase (1 1-fold up-regulated in 95% of CC-RCC) is an extracellular enzyme involved in connective tissue maturation. It is highly expressed in invasive breast cancer cell lines (Kirschmann, D A et al., (1999) Breast Cancer Res Treat 55:127-136) but has never been studied in RCC.

[0198] Finally, a well-known angiogenic factor, VEGF, has been shown to be highly expressed in RCC (Takahashi, A et al., (1994) Cancer Res 54:4233-4237; Thelen, P et al., (1999) Anticancer Res 19:1563-1565) and elevated in the serum of RCC patients (Sato, K et al., (1999) Jpn J Cancer Res 90:874-879; Wechsel, H W et al., (1999) Anticancer Res 19:1537-540). The present invention corroborated those observations and showed an average 5-fold up-regulation of VEGF in 96% of the CC-RCC tunors.

[0199] The present invention also identified a large number of examples of prominent down-regulation of DNAs in CC-RCC. Most strikingly, kininogen was more than 27-fold down-regulated. This protein, involved in the activation of the clotting system, has recently been shown to be anti-angiogenic (Zhang, J C et al. (2000) FASEB J 14: 2589-600). Its down regulation, never before reported in CC-RCC, in combination with the up-regulation of VEGF might explain the characteristic hypervascularization of CC-RCC.

[0200] The metallothionein (AT) family of genes was coordinately down regulated in CC-RCC. The products of these genes modulate the release of hydroxyl radicals and the exchange of heavy metals such as zinc, cadmium or copper. Differential expression of this class of genes has been reported in many cancers (Janssen, et al., (2000) J Pathol 192:293-300). Several subtypes, MT-1A, MT-1G, MT-1H were reported to be down regulated in RCC (Nguyen et al., (2000) Cancer Lett 160:13340; Izawa, et al., (1998) Urology 52:767-72). The present invention supports these reports and adds the fact that MT-1L and MT-1E were down-regulated.

[0201] Based on this model, the present inventors conceived that a distinctive molecular profile exists early in tumor development. The more aggressive type tumor progresses much more rapidly, and thus usually presents clinically at a more advanced stage, while tumors of the less aggressive class progress slowly and usually present clinically before tumor cells have invaded sites outside the kidney. This model is strongly supported by the dataset disclosed herein. Indeed, only one patient with CC-RCC having the aggressive molecular signature survived >5 years. This patient presented with stage m cancer, but 7 years later, had no evidence of disease (“NED”; Patient 30, Table 1).

[0202] Remarkably, the “molecular signature” approach of the present invention was of sufficient robustness to predict correctly the outcome in five cases in which the clinico-pathological information would have suggested otherwise.

[0203] One patient with the non-aggressive molecular signature had, at surgery, a grade 3 tumor invading the renal vein, but has since survived for 7.5 years (Patient 29, Table 1).

[0204] Another patient, with a stage II, grade 2 tumor went on to die of the cancer 4.6 years after surgery (Patient 55, Table 1 and Figures). Using the present molecular signature, the latter patient was classified as having the aggressive subtype.

[0205] Another patient with bone metastasis at diagnosis is still alive after 8.8 years and survives despite the bone metastasis, which is stable (Patient 54, Table 1 and Figures). Using the present approach, this patient was identified as having the non-aggressive molecular signature.

[0206] These cases and others demonstrate that the set of genes described herein, or a subset thereof, is useful in determining the prognosis of patients with CC-RCC.

[0207] Loss of the TGFβII signaling pathway in late stages of RCC has previously been shown.

[0208] TIMP3 is known to be downstream of TGFβ and is a known tumor suppressor gene. By inhibiting the function of matrix metalloproteinases, TIMP3 regulates cell adhesion and extracellular matrix homeostasis. Loss of TIMP3 expression by promoter methylation was shown to increase tumorigenicity due to unregulated MMPs (Bachman, et al., (1999) Cancer Res 59:798-802).

[0209] The present out clustering methodology has effectively demonstrated correlation of an entire pathway and its exclusive down regulation in the aggressive cancers. The ligands, the receptors and a downstream effectors are all down regulated and all are implicated in aggressive cancer.

[0210] The references cited above are all incorporated by reference herein, whether specifically incorporated or not.

1-42. (canceled)

43. A method of predicting whether a clear cell renal cell carcinoma (CC-RCC) in a subject is of a non-aggressive or aggressive type, comprising:
(a) examining the expression in tumor tissue from the subject of nucleic acid that hybridizes at high stringency conditions with
(i) one or more oligonucleotide or polynucleotide probes having the sequence of SEQ ID NO:1 through SEQ ID NO:21, inclusive; and/or
(ii) one or more oligonucleotide or polynucleotide probes having the sequence of SEQ ID NO: 22 through SEQ ID NO:39 inclusive;
(b) examining the expression in normal kidney tissue of the subject of nucleic acid that hybridizes at high stringency conditions with the oligonucleotide or polynucleotide probes of (a)(i) or (a)(ii);
(c) comparing the expression in tumor tissue in step (a) with the expression in normal tissue in step (b),
wherein:
(1) when the expression of nucleic acids hybridizing to the probe or probes of (a)(i) is up-regulated at least 2-fold in the tumor tissue compared to the normal kidney tissue, the CC-RCC is predicted to be non-aggressive; and/or
(2) when the expression of nucleic acids hybridizing to the probe or probes of (a)(ii) is down-regulated at least 2-fold, in the tumor tissue compared to the normal kidney tissue, the CC-RCC is predicted to be aggressive.

44. The method of claim 43, wherein, when the expression of the nucleic acids hybridizing to the probe or probes of (a)(i) is up-regulated at least 3-fold in the tumor tissue compared to the normal kidney tissue, the CC-RCC is predicted to be non-aggressive.

45. The method of claim 44, wherein, when said expression is up-regulated at least 4-fold in the tumor tissue compared to the normal kidney tissue, the CC-RCC is predicted to be non-aggressive.

46. The method of claim 43, wherein, when the expression of nucleic acids hybridizing to the probe or probes of (a)(ii) is down-regulated by at least 3-fold, in the tumor tissue compared to the normal kidney tissue, the CC-RCC is predicted to be aggressive.

47. The method of claim 46, wherein, when said expression is down-regulated by at least 4-fold, in the tumor tissue compared to the normal kidney tissue, the CC-RCC is predicted to be aggressive.

48. The method of claim 43 wherein the expression is examined with probes having the sequence of SEQ ID NO: 1 through SEQ ID NO:21 inclusive.

49. The method of claim 43 wherein the expression is examined with probes having the sequence of SEQ ID NO: 22 through SEQ ID NO:39 inclusive.

50. The method of claim 43, wherein the nucleic acid from the tumor or normal tissue is labeled with a detectable label.

51. The method of claim 50, wherein the detectable label is a fluorescent label.

52. The method of claim 51 wherein
(a) nucleic acids from the tumor and the tissue are labeled with a fluorescent label prior to the hybridization; and
(b) the hybridization is detected as a fluorescent signal bound to the probe.

53. The method of claim 43, wherein
(a) the probes are immobilized to a solid surface in a microarray of pixels; and
(b) the tumor tissue or normal kidney tissue samples are spotted onto the immobilized probe pixels.

54. The method of claim 53 wherein
(a) the immobilized probes are arranged as pixels in rows; and
(b) the tumor tissue or normal kidney tissue samples are spotted column-wise onto the probe pixels.

55. A method for early diagnosis in a subject of (i) a CC-RCC tumor prior to physical or radiological evidence of the tumor, or (ii) recurrence of a CC-RCC tumor after excision or other treatment of a CC-RCC primary tumor, the method comprising:
(a) selecting a protein product of at least one gene, the expression of which is up-regulated in a majority of CC-RCC patients, which protein is a secreted protein or is expressed on cell surfaces in a tissue that is readily accessible for assay; and
(b) determining the presence or measuring the quantity of the protein product in a body fluid or a tissue or cell sample from the subject,
wherein, an increased level of the protein product compared to
(i) the level of the protein in a normal subject's body fluid, tissue or cells, or
(ii) another reference normal value for the protein level,
is indicative of the presence of said CC-RCC tumor in the subject.

56. The method of claim 55 wherein the gene is one that hybridizes with one or more of:
(a) SEQ ID NO:40-SEQ ID NO:68; or
(b) SEQ ID NO:140-SEQ ID NO:230.

57. The method of claim 56 wherein the gene is one that hybridizes with one or more of SEQ ID NO:40-SEQ ID NO:68

58. An array of immobilized nucleic acid probes useful in a method of predicting whether CC-RCC in a subject is of a non-aggressive or aggressive type, or in a method for early diagnosis of a primary or recurring CC-RCC tumor, comprising:
(i) a first set of probes of any one or more of SEQ ID NO:1-SEQ ID NO:39 inclusive, SEQ ID NO:139 or SEQ ID NO:332-SEQ ID NO:497, inclusive, which first set probes are complementary to nucleic acid sequences of genes expressed differentially in aggressive as compared to non-aggressive types of CC-RCC; or
(ii) a second set of probes of any one or more of SEQ ID NO:40-SEQ ID NO:68 or SEQ ID NO:140-SEQ ID NO:230, inclusive, which second set probes are complementary to nucleic acid sequences of genes expressed differentially in a majority of CC-RCC patients compared to normal subjects or to another reference normal value,
which nucleic acid sequences hybridize to the probes under high stringency conditions.

59. The array of claim 58 which is a microarray wherein, the probes are immobilized in predetermined order such that a row of pixels corresponds to replicates of one distinct probe from the set.

60. The microarray of claim 59, wherein the set of probes comprises at least 10 cDNA probes have the sequence SEQ ID NO: 1-SEQ ID NO:10.

61. The microarray of claim 59, wherein the set of probes comprises at least 39 cDNA probes having the sequence SEQ ID NO: 1-SEQ ID NO:39.

62. The microarray of claim 59, wherein the set of probes comprises at least 206 cDNA probes having the sequence SEQ ID NO:1-SEQ ID NO:39, SEQ ID NO:139 and SEQ ID NO:332-SEQ ID NO:497.

63. The microarray of claim 59, wherein the probes comprise nucleotides having at least one modified phosphate backbone selected from a phosphorothioate, a phosphoridothioate, a phosphoramidothioate, a phosphoramidate, a phosphordiimidate, a methylsphosphonate, an alkyl phosphotriester, 3′-aminopropyl, a formacetal, or an analogue thereof.

64. The microarray of claim 59, wherein each probes comprises at least 15 nucleotides.

65. The microarray of claim 59, further comprising one or more nucleic acid samples representing expressed genes, each sample from an individual subject's tumor or normal tissue, each sample spotted column-wise on the pixels of the microarray probes.

66. The microarray of claim 62, which has further been subjected to nucleic acid hybridization under high stringency conditions such that the nucleic acid samples are hybridized with the immobilized probes on which the samples have been spotted.

67. A composition comprising a combination of two or more isolated oligonucleotide or polynucleotide probes each of which hybridizes with part or all of a coding sequence that is differentially expressed in
(i) CC-RCC tumors compared to normal kidney tissue, and/or
(ii) an aggressive type of CC-RCC compared to a non-aggressive type of CC-RCC.

68. The composition of claim 67 wherein the probes are immobilized to a solid surface in predetermined order such that a row of probe pixels corresponds to replicates of one distinct probe from the combination.

69. The composition of claim 67 comprising a combination of at least 2 of the probes.

70. The composition of claim 69 comprising a combination of at least 10 of the probes.

71. The composition of claim 70 comprising a combination of at least 39 of the probes.

72. The composition of claim 71 comprising a combination of at least 99 of the probes.

73. The composition of claim 72 comprising a combination of at least 206of the probes.

74. The composition of claim 73 comprising a combination of at least 291 of the probes.

75. The composition of claim 67, wherein the coding sequence is up-regulated in the aggressive CC-RCC compared to normal kidney tissue.

76. The composition of claim 67, wherein the coding sequence is down-regulated in the aggressive CC-RCC compared to normal kidney tissue.

77. The composition of claim 67, wherein the coding sequence is up-regulated in the non-aggressive CC-RCC compared to normal kidney tissue.

78. The composition of claim 67, wherein the coding sequence is down-regulated in the non-aggressive CC-RCC compared to normal kidney tissue.

79. A kit for evaluating expression of nucleic acids said kit being compartmentalized to receive in close confinement therein one or more containers, said kit comprising:
(a) an array according to claim 58;
(b) reagents that facilitate either one or both of (i) hybridization of the nucleic acid to the immobilized probes and (ii) detection of said hybridization; and
(c) optionally, a computer readable storage medium comprising logic which enables a processor to read data representing detection of hybridization.

80. A kit for evaluating expression of nucleic acids said kit being compartmentalized to receive in close confinement therein one or more containers, said kit comprising:
(a) a composition according to claim 67;
(b) reagents that facilitate either one or both of (i) hybridization of the nucleic acid to the immobilized probes and (ii) detection of said hybridization; and
(c) optionally, a computer readable storage medium comprising logic which enables a processor to read data representing detection of hybridization.

81. The kit of claim 79 wherein the array is a microarray on a solid surface and the probes are immobilized to the surface in predetermined order such that a row of probe pixels corresponds to replicates of one distinct probe from the first and/or the second probe set.

82. The kit of claim 79 wherein the detection employs fluorescence.

83. A kit for evaluating expression of nucleic acids said kit being compartmentalized to receive in close confinement therein one or more containers, said kit comprising:
(a) the array of claim 58;
(b) means for carrying out hybridization of the nucleic acid to the probes; and
(c) means for reading hybridization data.

84. A kit for evaluating expression of nucleic acids said kit being compartmentalized to receive in close confinement therein one or more containers, said kit comprising:
(a) the composition of claim 67;
(b) means for carrying out hybridization of the nucleic acid to the probes; and
(c) means for reading hybridization data.

85. The kit of claim 83 wherein the array is a microarray on a solid surface and the probes are immobilized to the surface in predetermined order such that a row of probe pixels corresponds to replicates of one distinct probe from the first and/or the second probe set.

86. The kit of claim 83, wherein the hybridization data being read is in the form of fluorescence data.

The application's sequence listing, which the Patent Office published only in electronic form, follows.

SEQUENCE LISTING (498 sequences)

SEQ ID NO: 1 - DNA, 1614 bp, Homo sapiens
atgggctgtgtgcaatgtaaggataaagaagcaacaaaactgacggaggagagggacggcagcctgaaccagagctctgggtaccgctatggcacagaccccacccctcagcactaccccagcttcggtgtgacctccatccccaactacaacaacttccacgcagccgggggccaaggactcaccgtctttggaggtgtgaactcttcgtctcatacggggaccttgcgtacgagaggaggaacaggagtgacactctttgtggccctttatgactatgaagcacggacagaagatgacctgagttttcacaaaggagaaaaatttcaaatattgaacagctcggaaggagattggtgggaagcccgctccttgacaactggagagacaggttacattcccagcaattatgtggctccagttgactctatccaggcagaagagtggtactttggaaaacttggccgaaaagatgctgagcgacagctattgtcctttggaaacccaagaggtacctttcttatccgcgagagtgaaaccaccaaaggtgcctattcactttctatccgtgattgggatgatatgaaaggagaccatgtcaaacattataaaattcgcaaacttgacaatggtggatactacattaccacccgggcccagtttgaaacacttcagcagcttgtacaacattactcagagagagctgcaggtctctgctgccgcctagtagttccctgtcacaaagggatgccaaggcttaccgatctgtctgtcaaaaccaaagatgtctgggaaatccctcgagaatccctgcagttgatcaagagactgggaaatgggcagtttggggaagtatggatgggtacctggaatggaaacacaaaagtagccataaagactcttaaaccaggcacaatgtcccccgaatcattccttgaggaagcgcagatcatgaagaagctgaagcacgacaagctggtccagctctatgcagtggtgtctgaggagcccatctacatcgtcaccgagtatatgaacaaaggaagtttactggatttcttaaaagatggagaaggaagagctctgaaattaccaaatcttgtggacatggcagcacaggtggctgcaggaatggcttacatcgagcgcatgaattatatccatagagatctgcgatcagcaaacattctagtggggaatggactcatatgcaagattgctgacttcggattggcccgattgatagaagacaatgagtacacagcaagacaaggtgcaaagttccccatcaagtggacggcccccgaggcagccctgtacgggaggttcacaatcaagtctgacgtgtggtcttttggaatcttactcacagagctggtcaccaaaggaagagtgccatacccaggcatgaacaaccgggaggtgctggagcaggtggagcgaggctacaggatgccctgcccgcaggactgccccatctctctgcatgagctcatgatccactgctggaaaaaggaccctgaagaacgccccacttttgagtacttgcagagcttcctggaagactactttaccgcgacagagccccagtaccaacctggtgaaaacctgtaa

SEQ ID NO: 2 - DNA, 3674 bp, Homo sapiens
tgtgtcccggcatggatatccggaacaacctcactaggttgcatgagctggagaattgctctgtcatcgaaggacacttgcagatactcttgatgttcaaaacgaggcccgaagatttccgagacctcagtttccccaaactcatcatgatcactgattacttgctgctcttccgggtctatgggctcgagagcctgaaggacctgttccccaacctcacggtcatccggggatcacgactgttctttaactacgcgctggtcatcttcgagatggttcacctcaaggaactcggcctctacaacctgatgaacatcacccggggttctgtccgcatcgagaagaacaatgagctctgttacttggccactatcgactggtcccgtatcctggattccgtggaggataattacatcgtgttgaacaaagatgacaacgaggagtgtggagacatctgtccgggtaccgcgaagggcaagaccaactgccccgccaccgtcatcaacgggcagtttgtcgaacgatgttggactcatagtcactgccagaaagtttgcccgaccatctgtaagtcacacggctgcaccgccgaaggcctctgttgccacagcgagtgcctgggcaactgttctcagcccgacgaccccaccaagtgcgtggcctgccgcaacttctacctggacggcaggtgtgtggagacctgcccgcccccgtactaccacttccaggactggcgctgtgtgaacttcagcttctgccaggacctgcaccacaaatgcaagaactcgcggaggcagggctgccaccagtacgtcattcacaacaacaagtgcatccctgagtgtccctccgggtacacgatgaattccagcaacttgctgtgcaccccatgcctgggtccctgtcccaaggtgtgccacctcctagaaggcgagaagaccatcgactcggtgacgtctgcccaggagctccgaggatgcaccgtcatcaacgggagtctgatcatcaacattcgaggaggcaacaatctggcagctgagctagaagccaacctcggcctcattgaagaaatttcagggtatctaaaaatccgccgatcctacgctctggtgtcactttccttcttccggaagttacgtctgattcgaggagagaccttggaaattgggaactactccttctatgccttggacaaccagaacctaaggcagctctgggactggagcaaacacaacctcaccatcactcaggggaaactcttcttccactataaccccaaactctgcttgtcagaaatccacaagatggaagaagtttcaggaaccaaggggcgccaggagagaaacgacattgccctgaagaccaatggggaccaggcatcctgtgaaaatgagttacttaaattttcttacattcggacatcttttgacaagatcttgctgagatgggagccgtactggccccccgacttccgagacctcttggggttcatgctgttctacaaagaggccccttatcagaatgtgacggagttcgacgggcaggatgcatgtggttccaacagttggacggtggtagacattgacccacccctgaggtccaacgaccccaaatcacagaaccacccagggtggctgatgcggggtctcaagccctggacccagtatgccatctttgtgaagaccctggtcaccttttcggatgaacgccggacctatggggccaagagtgacatcatttatgtccagacagatgccaccaacccctctgtgcccctggatccaatctcagtgtctaactcatcatcccagattattctgaagtggaaaccaccctccgaccccaatggcaacatcacccactacctggttttctgggagaggcaggcggaagacagtgagctgttcgagctggattattgcctcaaaggtgagccatctcggaaacgcaggtcccttggcgatgttgggaatgtgacggtggccgtgcccacggtggcagctttccccaacacttcctcgaccagcgtgcccacgagtccggaggagcacaggccttttgagaaggtggtgaacaaggagtcgctggtcatctccggcttgcgacacttcacgggctatcgcatcgagctgcaggcttgcaaccaggacacccctgaggaacggtgcagtgtggcagcctacgtcagtgcgaggaccatgcctgaagccaaggctgatgacattgttggccctgtgacgcatgaaatctttgagaacaacgtcgtccacttgatgtggcaggagccgaaggagcccaatggtctgatcgtgctgtatgaagtgagttatcggcgatatggtgatgaggagctgcatctctgcgtctcccgcaagcacttcgctctggaacggggctgcaggctgcgtgggctgtcaccggggaactacagcgtgcgaatccgggccacctcccttgcgggcaacggctcttggacggaacccacctatttctacgtgacagactattgcagccagatgggccgctgggaccgctttacgcttcttcaaaccctgagtatctcagtgccagtgatggtgtctcgagagaagatcaccctccttcgagagctggggcagggctccttcggcatggtgtatgagggcaatgccagggacatcatcaagggtgaggcagagacccgcgtggcggtgaagacggtcaacgagtcagccagtctccgagagcggattgagttcctcaatgaggcctcggtcatgaagggcttcacctgccatcacgtggtgcgcctcctgggagtggtgtccaagggccagcccacgctggtggtgatggagctgatggctcacggagacctgaagagctacctccgttctctgcggccagaggctgagaataatcctggccgccctccccctacccttcaagagatgattcagatggcggcagagattgctgacgggatggcctacctgaacgccaagaagtttgtgcatcgggacctggcagcgagaaactgcatggtcgcccatgattttactgtcaaaattggagactttggaatgaccagagacatctatgaaacggattactaccggaaagggggcaagggtctgctccctgtacggtggatggcaccggagtccctgaaggatggggtcttcaccacttcttctgacatgtggtcctttggcgtggtcctttgggaaatcaccagcttggcagaacagccttaccaaggcctgtctaatgaacaggtgttgaaatttgtcatggatggagggtatctggatcaacccgacaactgtccagagagagtcactgacctcatgcgcatgtgctggcaattcaaccccaagatgaggccaaccttcctggagattgtcaacctgctcaaggacgacctgcaccccagctttccagaggtgtcgttcttccacagcgaggagaacaaggctcccgagagtgaggagctggagatggagtttgaggacatggagaatgtgcccctggaccgttcctcgcactgtcagagggaggaggcggggggccgggatggagggtcctcgctgggtttcaagcggagctacgaggaacacatcccttacacacacatgaacggaggcaagaaaaacgggcggattctgaccttgcctcggtccaatccttcctaa

SEQ ID NO: 3 - DNA, 1458 bp, Homo sapiens
atggcaaggaggagctcgttccagtcgtgtcagataatatccctgttcacttttgccgttggagtcaatatctgcttaggattcactgcacatcgaattaagagagcagaaggatgggaggaaggtcctcctacaggagagtcgcattgggttgatgatgactgtgaggaaataaaggccgcagaatgccctgcagggtttgttcgccctccattaatcatcttctccgtggatggcttccgtgcatcatacatgaagaaaggcagcaaagtcatgcctaatattgaaaaactaaggtcttgtggcacacactctccctacatgaggccggtgtacccaactaaaacctttcctaacttatacactttggccactatgacaaatcctctgagggaaatcgacaaaattgtggggcaattaatggatggactgaaacaactaaaactgcatcggtgtgtcaacgtcatctttgtcggagaccatggaatggaagatgtcacatgtgatagaactgagttcttgagtaattacctaactaatgtggatgatattactttagtgcctggaactctaggaagaattcgatccaaatttagcaacaatgctaaatatctcctgggattgaagccagctcctaataatgggacccatggaagtttgaatcatctcctgcgcactaataccttcaggccaaccatgccagaggaagttaccagacccaattatccagggattatgtaccttcagtctgattttgacctgggctgcacttgtgatgataaggctgaggtttccagcgttcctgaccatctgaccagttgcgtccggcctgatgtccgtgtttctccgagtttcagtcagaactgtttggcctacaaaaatgataagcagatgtcctacggattcctctttcctccttatctgagctcttcaccagaggctaaatatgatgcattccttgtaaccaatatggttccaatgtatcctgctttcaaacgggtctggaattatttccaaagggtattggtgaagaaatatgcttcggaaagaaatggagttaacgtgataagtggaccaatcttcgactatgactatgatggcttacatgacacagaagacaaaataaaacagtacgtggaaggcagttccattcctgttccaactcactactacagcatcatcaccagctgtctggatttcactcagcctgccgacaagtgtgacggccctctctctgtgtcctccttcatcctgcctcaccggcctgacaacgaggagagctgcaatagctcagaggacgaatcaaaatgggtagaagaactcatgaagatgcacacagctagggtgcgtgacattgaacatctcaccagcctggacttcttccgaaagaccagccgcagctacccagaaatcctgacactcaagacatacctgcatacatatgagagcgagatttaa

SEQ ID NO: 4 - DNA, 1196 bp, Homo sapiens
acaaatgcaagattattatctgatcattccaaaccaactgctgaaacggtagcacccgacaacactgcaatccccagtttaagggctgaagctgaagaaaatgaaaaagaaacagcagtatccacagaagacgattcccaccataaggctgaaaaatcatcagtactaaagtcaaaagaggaaagccatgaacagtcagcagaacagggcaagagttctagccaagagctgggattgaaggatcaagaggacagtgatggtcacttaagtgtgaatttggagtatgcaccaactgaaggtacattggacataaaagaagatatgagtgagcctcaggagaaaaaactctcagagaacactgattttttggctcctggtgttagttccttcacagattctaaccaacaagaaagtatcacaaagagagaggaaaaccaagaacaacctagaaattattcacatcatcagttgaacaggagcagtaaacatagccaaggcctaagggatcaaggaaaccaagagcaggatccaaatatttccaatggagaagaggaagaagaaaaagagccaggtgaagttggtacccacaatgataaccaagaaagaaagacagaattgcccagggagcatgctaacagcaagcaggaggaagacaatacccaatctgatgatattttggaagagtctgatcaaccaactcaagtaagcaagatgcaggaggatgaatttgatcagggtaaccaagaacaagaagataactccaatgcagaaatggaagaggaaaatgcatcgaacgtcaataagcacattcaagaaactgaatggcagagtcaagagggtaaaactggcctagaagctatcagcaaccacaaagagacagaagaaaagactgtttctgaggctctgctcatggaacctactgatgatgattcttgcatgagcttccagtgtaaaagaggccacatctgtaaggcagaccaacagggaaaacctcactgtgtctgccaggatccagtgacttgtcctccaacaaaaccccttgatcaagtcaagaaaatttacctggatgaaaagaggcttttggctggggaccatcccattgaccttctcttaagggactttaagaaaaactaccacatgtatgtgtatcctgtgcactggcagtttagtgaacttgaccaacaccctatggatag

SEQ ID NO: 5 - DNA, 9890 bp, Homo sapiens
attcccgacagttaagcaatggggagacatttggctttgctcctgcttctgctccttctcttccaacattttggagacagtgatggcagccaacgacttgaacagactactactgcagtttacacacctcgagtacaacgtcaccgtgcaggagaactctgcagctaagacttatgtggggcatcctgtcaagatgggtgtttacattacacatccagcgtgggaagtaaggtacaaaattgtttccggagacagtgaaaacctgttcaaagctgaagagtacattctcggagacttttgctttctaagaataaggaccaaaggaggaaatacagctattcttaatagagaagtgaaggatcactacacattgatagtgaaagcacttgaaaaaaatactaatgtggaggcgcgaacaaaggtcagggtgcaggtgctggatacaaatgacttgagaccgttattctcacccacctcatacagcgtttctttacctgaaaacacagctataaggaccagtatcgcaagagtcagcgccacggatgcagacataggaaccaacggggaattttactacagttttaaagatcgaacagatatgtttgctattcacccaaccagtggtgtgatagtgttaactggtagacttgattacctagagaccaagctctatgagatggaaatcctcgctgcggaccgtggcatgaagttgtatgggagcagtggcatcagcagcatggccaagctaacggtgcacatcgaacaggccaatgaatgtgctccggtgataacagcagtgacattgtcaccatcagaactggacagggacccagcatatgcaattgtgacagtggatgactgcgatcagggtgccaatggtgacatagcatctttaagcatcgtggcaggtgaccttctccagcagtttagaacagtgaggtcctttccagggagtaaggagtataaagtcaaagccatcggtggcattgattgggacagtcatcctttcggctacaatctcacactacaggctaaagataaaggaactccgccccagttctcttctgttaaagtcattcacgtgacttctccacagttcaaagccgggccagtcaagtttgaaaaggatgtttacagagcagaaataagtgaatttgctcctcccaacacacctgtggtcatggtaaaggccattcctgcttattcccatttgaggtatgtttttaaaaggacacctggaaaagctaaattcagtttaaattacaacactggtctcatttctattttagaaccagttaaaagacagcaggcagcccattttgaacttgaagtaacaacaagtgacagaaaagcgtccaccaaggtcttggtgaaagtcttaggtgcaaatagcaatccccctgaatttacccagacagcgtacaaagctgcttttgatgagaacgtgcccattggtactactatcatgagcctgagtgccgtagaccctgatgagggtgagaatgggtacgtgacatacagtatcgcaaatttaaatcatgtgccgtttgcgattgaccatttcactggtgccgtgagtacgtcagaaaacctggactacgaactgatgcctcgggtttatactctgaggattcgtgcatcagactggggcttgccgtaccgccgggaagtcgaagtccttgctacaattactctcaataacttgaatgacaacacacctttgtttgagaaaataaattgtgaagggacaattcccagagatctaggcgtgggagagcaaataaccactgtttctgctattgatgcagatgaacttcagttggtacagtatcagattgaagctggaaatgaactggatttgtttagtttaaaccccaactcgggggtattgtcattaaagcgatcgctaatggatggcttaggtgcaaaggtgtctttccacagtctgagaatcacagctacagatggagaaaattttgccacaccattatatatcaacataacagtggctgccagtcacaagctggtaaacttgcagtgtgaagagactgtatcactagaagatgttaatgacaacccacctacatttattccacctaattatcgtgtgaaagtccgagaggatcttccagaaggaaccgtcatcatgtggttagaagcccacgatcctgatttaggtcagtctggtcaggtgagatacagccttctggaccacggagaaggaaacttcgatgtggataaactcagtggagcagttaggatcgtccagcagttggactttgagaagaagcaagtgtataatctcactgtgagggccaaagacaagggaaagccagtttctctgtcttctacttgctatgttgaagttgaggtggttgatgtgaatgagaacctgcacccacccgtgttttccagctttgtggaaaaggggacagtgaaagaagatgcacctgttggttcattggtaatgacggtgtcggctcatgatgaggacgccggaagagatggggagatccgatactccattagagatggctctggcgttggtgttttcaaaataggtgaagagacaggtgtcatagagacgtcagatcgactggaccgtgaatcgacctcccattattggctaacagtctttgcaaccgatcagggtgtcgtgcctctttcatcgttcatagagatctacatagaggttgaggatgtcaatgacaatgcaccacagacatcagagcctgtttattacccagaaatcatggaaaattctcctaaagatgtatctgtggtccagatcgaggcatttgatccagattcgagctctaatgacaagctcatgtacaaaattacaagtggaaatccacaaggattcttttcaatacatcctaaaacaggtctcatcacaactacgtcaaggaagctagaccgagaacagcaagatgaacacatattagaggttactgtgacagacaatggtagtccccccaaatcaaccattgcaagagtcattgtgaaaatccttgatgaaaatgacaacaaacctcagtttctgcaaaagttctacaaaatcagactccctgagcgggaaaagccagaccgagaaagaaatgccagacgggagccgctctatcacgtcatagccaccgacaaggatgagggccccaatgcagaaatctcctacagcatcgaagacgggaatgagcatggcaaatttttcatcgaaccgaaaactggagtggtttcgtccaagaggttttcagcagctggagaatatgatattctttcaattaaggcagttgacaatggtcgccctcaaaagtcatcaaccaccagactccatattgaatggatctccaagcccaaaccgtccctggagcccatttcatttgaagaatcattttttacctttactgtgatggaaagtgaccccgttgctcacatgattggagtaatatctgtggagcctcctggcatacccctttggtttgacatcactggtggcaactacgacagtcacttcgatgtggacaagggaactggaaccatcattgttgccaaacctcttgatgcagaacagaagtcaaactacaacctcacagtcgaggctacagatggaaccaccactatcctcactcaggtattcatcaaagtaatagacacaaatgaccatcgtcctcagttttctacatcaaagtatgaagttgttattcctgaagatacagcgccagaaacagaaattttgcaaatcagtgctgtggatcaggatgagaaaaacaaactaatctacactctgcagagcagtagagatccactgagtctcaagaaatttcgtcttgatcctgcaaccggctctctctatacttctgagaaactggatcatgaagctgttcaccagcacaccctcacggtcatggtacgagatcaagatgtgcctgtaaaacgcaactttgcaaggattgtggtcaatgtcagcgacacgaatgaccacgccccgtggttcaccgcttcctcctacaaagggcgggtttatgaatcggcagccgttggctcagttgtgttgcaggtgacggctctggacaaggacaaagggaaaaatgctgaagtgctgtactcgatcgagtcaggaaatattggaaattcttttatgattgatcctgtcttgggctctattaaaactgccaaagaattagatcgaagtaaccaagcggagtatgatttaatggtaaaagctacagataagggcagtccaccaatgagtgaaataacttctgtgcgtatctttgtcacaattgctgacaacgcctctccgaagtttacatcaaaagaatattctgttgaacttagtgaaactgtcagcattgggagtttcgttgggatggttacagcccatagtcaatcatcagtggtgtatgaaataaaagatggaaatacaggtgatgcttttgatattaatccacattctggaactatcatcactcagaaagccctggactttgaaactttgcccatttacacattgataatacaaggaactaacatggctggtttgtccactaatacaacggttctagttcacttgcaggatgagaatgacaacgcgccagtttttatgcaggcagaatatacaggactcattagtgaatcagcctcaattaacagcgtggtcctaacagacaggaatgtcccactggtgattcgagcagctgatgctgataaagactcaaatgctttgcttgtatatcacattgttgaaccatctgtacacacatattttgctattgattctagcactggtgctattcatacagtactaagtctggactatgaagaaacaagtatttttcactttaccgtccaagtgcatgacatgggaaccccacgtttatttgctgagtatgcagcgaatgtaacagtacatgtaattgacattaatgactgcccccctgtgtttgccaagccattatatgaagcatctcttttgttaccaacatacaaaggagtaaaagtcatcacagtaaatgctacagatgctgattcaagtgcattctcacagttgatttactccatcaccgaaggcaacatcggggagaagttttctatggactacaagactggtgctctcactgtccaaaacacaactcagttaagaagccgctacgagctaaccgttagagcttccgatggcagatttgccggccttacctctgtcaaaattaatgtgaaagaaagcaaagaaagtcacctaaagtttacccaggatgtctactctgcggtagtgaaagagaattccaccgaggccgaaacattagctgtcattactgctattgggaatccaatcaatgagcctttgttttatcacatcctcaacccagatcgcagatttaaaataagccgcacttcaggagttctgtcaaccactggcacgcccttcgatcgtgagcagcaggaggcgtttgatgtggttgtagaagtgacagaggaacataagccttctgcagtggcccacgttgtcgtgaaggtcattgtagaagaccaaaatgataatgcgccggtgtttgtcaaccttccctactacgccgttgttaaagtggacactgaggtgggccatgtcattcgctatgtcactgctgtagacagagacagtggcagaaacggggaagtgcattactacctcaaggaacatcatgaacactttcaaattggacccttggtggttgcaaaagatggagggaacccggccttttcagcggaagttatcgttccgatcactgtcatgaataaagccatgcctgtgtttgaaaaacctttctacagtgcagagattgcagagagcatccaggtgcacagccctgtggtccacgtgcaggctaacagcccggaaggcctgaaagtgttctacagcatcacagacggagaccctttcagccagttcactattaacttcaatactggagttatcaatgtcatagctcctctggactttgaggcccacccggcatataagctgagcatacgcgcaactgactccttgacgggcgctcatgctgaagtatttgtggacatcatagtagacgacatcaatgataaccctcctgtgtttgctcagcagtcttatgcggtgaccctgtctgaggcatctgtaattggaacgtctgttgttcaagttagagccaccgattctgattcagaaccaaatagaggaatctcataccagatgtttgggaatcacagcaagagtcatgatcattttcatgtagacagcagcactggcctcatctcactactcagaaccctggattacgagcagtcccggcagcacacgatttttgtgagggcagttgatggtggtatgcccacgctgagcagtgatgtgattgtcacggtggacgttaccgacctcaatgataatccaccactctttgaacaacagatttatgaagccagaattagcgagcacgcccctcatgggcatttcgtgacctgtgtaaaagcctatgatgcagacagttcagacatagacaagttgcagtattccattctgtctggcaatgatcataaacattttgtcattgacagtgcaacagggattatcaccctctcaaacctgcaccggcacgccctgaagccattttacagtcttaacctgtcagtgtctgatggagtttttagaagttccacccaggttcatgtaactgtaattggaggcaatttgcacagtcctgctttccttcagaacgaatatgaagtggaactagctgaaaacgctcccctacataccctggtgatggaggtgaaaactacggatggggattctggtatttatggtcacgttacttaccatattgtaaatgactttgccaaagacagattttacataaatgagagaggacagatatttactttggaaaaacttgatcgagaaaccccggcggagaaagtgatctcagtccgtttaatggctaaggatgctggaggaaaagttgctttctgcaccgtgaatgtcatccttacagatgacaatgacaatgcaccacaatttcgagcaaccaaatacgaagtgaatatcgggtccagtgctgctaaagggacttcagtcgttaaagttcttgcaagtgatgccgatgagggctccaatgccgacatcacctatgccattgaagcagactctgaaagtgtaaaagagaatttggaaattaacaaactgtccggcgtaatcactacaaaggagagcctcattggcttggaaaatgaattcttcactttctttgttagagctgtggataatgggtctccatcaaaagaatctgttgttcttgtctatgttaaaatccttccaccggaaatgcagcttccaaaattttcagaacctttctatacctttacagtgtcagaggacgtgcctattggaacagagatagatctcatccgagcagaacatagtgggactgttctttacagcctggtcaaagggaatactccagaaagcaatagggatgagtcctttgtgattgacagacagagcgggagactgaagttggagaagagtcttgatcatgagacaactaagtggtatcagttttccatactggccaggtgcactcaagatgaccatgagatggtggcttctgtagatgttagtatccaagtgaaagatgcaaatgacaacagcccggtctttgaatctagtccatatgaggcattcattgttgaaaacctgccagggggaagtagagtaattcagatcagggcatctgatgctgactcaggaaccaacggccaagttatgtatagcctggatcagtcacaaagtgtggaagtcattgaatcctttgccattaacatggaaacaggctggattacaactttaaaggaacttgaccatgaaaagagagacaattaccagattaaagtggttgcatcagatcatggtgaaaagatccagctatcctccacaaccattgtggatgttacccggcccgctgtcaccgatagtccaccacgatttacggccgagatctataatggggcttgtgagggagatgaccccctatgggggatttcaggttacacgctcacggttcaagcttctgataatggcagtccacccagagtcaacacgacgaccgtgaacatcgatgtgtccgatgtcaatgacaacgcgcccgtcttctccaggggaaactacagtgtcattattcagtggcttcaaggccagggggcctgggaaaataagccagtgggcttcagcgtgctgcagctggtagtaacagatgaggattcttcccataacggtccacccttcttctttactattgtaactggaaatgatgagaaggcttttgaagttaacccgcaaggagtcctcctgacatcatctgccatcaagaggaaggagaaagatcattacttactgcaggtgaaggtggcagataatggaaagcctcagttgtcatctttgacatacattgacattagggtaattgaggagagcatcttttcgcctgcgattttgcccctggagaattttatcacctcttctggagaagaaactcagcacagggggcaagctgatagcacacaaaaagctagacatagggcaataccttctcaatgtcagcgtaacagatgggaagttcacgacggtggccgacatcacagtgcatatcagacaagtcacacaggagatgttgaaccacaccatcgcgatccgctttgccaacctcctccggaagaattcgttggtgactactggcgcaacttccagcgagctttacggaacatcctgggtgtgaggaggaacgacatacagattgttagtttgcagtcctctgaacctcacccacatctggacgtcttactttttgtagagaaaccaggtagtgctcagatctcaacaaaacaacttctgcacaagattaactcttccgtgactgacattgaggaaatcattggagttaggatactgaatgtattccagaaactctgcgcgggactggactgcccctggaagttctgcgatgaaaaggtgtctgtggatgaaagtgtgatgtcaacacacagcacagccagactgagttttgtgactccccgccaccacagggcagcggtgtgtctctgcaaaggtgaactgaaaacgtcaaccccccttgatcgtgaggagcaagctgtttatcatcttctcgtcagggccacagatggaggaggaagattctgccaagccagtattgtgctcacgctagaagatgtgaacgataacgcccccgaattctctgccgatccttatgccatcaccgtgtttgaaaacacagagccgggaactgctgctgacaagagtgcaggccacagatgccgacgcagccacgagtacaggggacgtcactgcgaggatgctgcgcccaaccagtatgtgtccacgccgtggaacattgggttggcggaaggaattggaatcgttgtgtttgttgcagggatatttttactggtggtggtgtttgttctctgccgtaagatgattagtcggaaaaagaagcatcaggctgaacctaaagacaagcacctgggacccgctacggctttcttgcaaagaccgtattttgattccaagctaaataagaacatttactcagacataccaccccaggtgcctgtccggcctatttcctacaccccgagtattccaagtgactcaagaaacaatctggaccgaaattccttcgaaggatctgctatcccagagcatcccgaattcagcacttttaaccccgagtctgtgcacgggcaccgaaaagcagtggcggtctgcagcgtggcgccaaacctgcctcccccacccccttcaaactccccttctgacagcgactccatccagaagcctagctgggactttgactatgaca

SEQ ID NO: 6 - DNA, 2343 bp, Homo sapiens
gagcgctaacgtctttctgtctccccgcggtggtgatgacggtgaaaactgaggctgctaagggcaccctcacttactccaggatgaggggcatggtggcaattctcatcgctttcatgaagcagaggaggatgggtctgaacgactttattcagaagattgccaataactcctatgcatgcaaacaccctgaagttcagtccatcttgaagatctcccaacctcaggagcctgagcttatgaatgccaacccttctcctccaccaagtccttctcagcaaatcaaccttggcccgtcgtccaatcctcatgctaaaccatctgactttcacttcttgaaagtgatcggaaagggcagttttggaaaggttcttctagcaagacacaaggcagaagaagtgttctatgcagtcaaagttttacagaagaaagcaatcctgaaaaagaaagaggagaagcatattatgtcggagcggaatgttctgttgaagaatgtgaagcaccctttcctggtgggccttcacttctctttccagactgctgacaaattgtactttgtcctagactacattaatggtggagagttgttctaccatctccagagggaacgctgcttcctggaaccacgggctcgtttctatgctgctgaaatagccagtgccttgggctacctgcattcactgaacatcgtttatagagacttaaaaccagagaatattttgctagattcacagggacacattgtccttactgacttcggactctgcaaggagaacattgaacacaacagcacaacatccaccttctgtggcacgccggagtatctcgcacctgaggtgcttcataagcagccttatgacaggactgtggactggtggtgcctgggagctgtcttgtatgagatgctgtatggcctgccgcctttttatagccgaaacacagctgaaatgtacgacaacattctgaacaagcctctccagctgaaaccaaatattacaaattccgcaagacacctcctggagggcctcctgcagaaggacaggacaaagcggctcggggccaaggatgacttcatggagattaagagtcatgtcttcttctccttaattaactgggatgatctcattaataagaagattactcccccttttaacccaaatgtgagtgggcccaacgacctacggcactttgaccccgagtttaccgaagagcctgtccccaactccattggcaagtcccctgacagcgtcctcgtcacagccagcgtcaaggaagctgccgaggctttcctaggcttttcctatgcgcctcccacggactctttcctctgaaccctgttagggcttggttttaaaggattttatgtgtgtttccgaatgttttagttagccttttggtggagccgccagctgacaggacatcttacaagagaatttgcacatctctggaagcttagcaatcttattgcacactgttcgctggaagctttttgaagagcacattctcctcagtgagctcatgaggttttcatttttattcttccttccaacgtggtgctatctctgaaacgagcgttagagtgccgccttagacggaggcaggagtttcgttagaaagcggacgctgttctaaaaaaggtctcctgcagatctgtctgggctgtgatgacgaatattatgaaatgtgccttttctgaagagattgtgttagctccaaagcttttcctatcgcagtgtttcagttctttattttcccttgtggatatgctgtgtgaaccgtcgtgtgagtgtggtatgcctgatcacagatggattttgttataagcatcaatgtgacacttgcaggacactacaacgtgggacattgtttgtttcttccatatttggaagataaatttatgtgtagacttttttgtaagatacggttaataactaaaatttattgaaatggtcttgcaatgactcgtattcagatgcttaaagaaagcattgctgctacaaatatttctatttttagaaagggtttttatggaccaatgccccagttgtcagtcagagccgttggtgtttttcattgtttaaaatgtcacctgtaaaatgggcattatttatgtttttttttttgcattcctgataattgtatgtattgtataaagaacgtctgtacattgggttataacactagtatatttaaacttacaggcttatttgtaatgtaaaccaccattttaatgtactgtaattaacatggttataatacgtacaatccttccctcatcccatcacacaactttttttgtgtgtgataaactgattttggtttgcaataaaaccttgaaaaata

SEQ ID NO: 7 - DNA, 2075 bp, Homo sapiens
agacagttttgaagttttcaaagactggctctgctgttaagaagttgtacttaaagcggaggagctaagccacctgccaaaatgtgcaaaggacttgcagctttgccccactcatgcctggaaagggccaaggagattaagatcaagttgggaattctcctccagaagccagactcagttggtgaccttgtcattccgtacaatgagaagccagagaaaccagccaagacccagaaaacctcgctggacgaggccctgcagtggcgtgattccctggacaaactcctgcagaacaactatggacttgccagtttcaaaagtttcctgaagtctgaattcagtgaggaaaaccttgagttctggattgcctgtgaggattacaagaagatcaagtcccctgccaagatggctgagaaggcaaagcaaatttatgaagaattcattcaaacggaggctcctaaagaggtgaatattgaccacttcactaaggacatcacaatgaagaacctggtggaaccttccctgagcagctttgacatggcccagaaaagaatccatgccctgatggaaaaggattctctgcctcgctttgtgcgctctgagttttatcaggagttaatcaagtagtaatttagccaggctatgaaatcatcctgtgagttatttcctccataataaccctgcatttcccattaatctacatatcttcccacagcagctttgctcagtgatacccacatgggaaaaatcccaggggatgttgcttactctttttgcccacactgctttggatacttatctactgtccgaaggccttctttccccactcaattcttcctgccctgttattaattaagatatcttcagcttgtagtcagacacaatcagaatcacagaaaaatcctgcctaaggcaaagaaatataagacaagactatgatatcaatgaatgtgggttaagtaatagatttccagctaaattggtctaaaaaagaatattaagtgtggacagacctatttcaaaggagcttaattgatctcacttgttttagttctgatccagggagatcacccctctaattatttctgaacttggttaataaaagtttataagatttttatgaagcagccactgtatgatattttaagcaaatatgttatttaaaatattgatccttcccttggaccaccttcatgttagttgggtattataaataagagatacacccatgaatatattatgtttatacaaaatcaatctgaacacaattcataaagatttctcttttataccttcctcactggccccctccacctgcccatagtcaccaaattctgttttaaatcaatgacctaagatcaacaatgaagtattttataaatgtatttatgctgctagactgtgggtcaaatgtttccattttcaaattatttagaattcttatgagtttaaaatttgtaaatttctaaatccaatcatgtaaaatgaaactgttgctccattggagtagtctcccacctaaatatcaagatggctatatgctaaaaagagaaaatatggtcaagtctaaaatggctaattgtcctatgatgctattatcatagactaatgacatttatcttcaaaacaccaaattgtctttagaaaaattaatgtgattacaggtagaggccttctaggtgagacacttttaaggtacactgcattttgcaaaaaaaaaaaaaaaaagtaatcttttagcaaccccagtattccttcactatttcgcttcctgcattagcaaattttacttacagtcaaaagtgcagatttatactcctgacgtgtctcattcacagctaaataataggccataggacttttggtaggtttaaacttttaattctgtatttcatgattataagtcttgctagaattttttctaatctttagtagatttgattaaataatgattcacagaatttagtaacagaatcaaactaagccatgtatgagggtaatcgagatgaggatattaactcaaaagaaatagggtgatttttaaaggattaataaaattctgaaatgttaagtag

SEQ ID NO: 8 - DNA, 1285 bp, Homo sapiens
cctatcccctagaactgccacgtggggatgagatttgctgggctggtagcggcggctgctgcgggaggtcccgcccacgtgaagccagcctaactgagctctggactttggggacagctgtcagtggcctaggccgcaggacaccatgaagcaactgccagtcttggaacctggagacaagcccaggaaagcaacatggtacaccttggactgtccctggagacagcccctgtgctcgagttggccacagctgttcatatttacccccagttggtaatgccaagagagggaaggtcttcattgttgggggagcaaatccaaacagaagcttctcagacgtgcacaccatggatctgggaaaacaccagtgggacttagatacctgcaagggcctcttgccccggtatgaacatgctagcttcattccctcctgcacacctgaccgtatctgggtatttggaggtgccaaccaatcaggaaatcgaaattgtctacaagtcctgaatcctgaaaccaggacgtggaccacgccagaagtgaccagccccccaccatccccaagaacattccacacatcatcggcagccattggaaaccagctatatgtctttgggggcggagagagaggtgcccagcccgtgcaggacacgaagctgcatgtgtttgacgcaaacactctgacctggtcacagccagagacacttggaaatcctccatctccccggcatggtcatgtgatggtggcagcagggacaaagctcttcatccacggaggcttggcgggggacagattctatgatgacctccactgcattgatataagtgacatgaaatggcagaagctaaatcccactggggctgctccagcaggctgtgctgcccactcagctgtggccatgggaaaacatgtgtacatctttggtggaatgactcctgcaggagcactggacacaatgtaccagtatcacacagaagagcagcattggaccttgcttaaatttgatactcttctaccccctggacgattggaccattccatgtgtatcattccatggccagtgacgtgtgcttctgagaaagaagattccaactctctcactctgaaccatgaagctgagaaagaggattcagctgacaaagtaatgagccacagtggtgactcacatgaggaaagccagactgctacactgctctgtttggtgtttggtgggatgaatacagaaggggaaatctatgacgattgtattgtgactgtagtggactaataaaacccacatttttatta

SEQ ID NO: 9 - DNA, 2160 bp, Homo sapiens
ctagatgtagaagacagaagtagctcagggtcctgggggaatggaggacatccaagcccgtccaggaactatggagatgggactccctatgaccacatgaccagcagggaccttgggtcacatgacaatctctctccaccttttgtcaattccagaatacaaagtaaaacagaaaggggctcatactcatcttatgggagagaatcaaacttacagggttgccaccagcagagtctccttggaggtgacatggatatgggcaacccaggaaccctttcgcccaccaaacctggttcccagtactatcagtattctagcaataatccccgaaggaggcctcttcacagtagtgccatggaggtacagacaaagaaagttcgaaaagttcctccaggtttgccatcttcagtctatgctccatcagcaagcactgccgactacaatagggactcgccaggctatccttcctccaaaccagcaaccagcactttccctagctccttcttcatgcaagatggccatcacagcagtgacccttggagctcctccagtgggatgaatcagcctggctatgcaggaatgttgggcaactcttctcatattccacagtccagcagctactgtagcctgcatccacatgaacgtttgagctatccatcacactcctcagcagacatcaattccagtcttcctccgatgtccactttccatcgtagtggtacaaaccattacagcacctcttcctgtacgcctcctgccaacgggacagacagtataatggcaaatagaggaagcggggcagccggcagctcccagactggagatgctctggggaaagcacttgcttcgatctattctccagatcacactaacaacagcttttcatcaaacccttcaactcctgttggctctcctccatctctctcagcaggcacagctgtttggtctagaaatggaggacaggcctcatcgtctcctaattatgaaggacccttacactctttgcaaagccgaattgaagatcgtttagaaagactggatgatgctattcatgttctccggaaccatgcagtgggcccatccacagctatgcctggtggtcatggggacatgcatggaatcattggaccttctcataatggagccatgggtggtctgggctcagggtatggaaccggccttctttcagccaacagacattcactcatggtggggacccatcgtgaagatggcgtggccctgagaggcagccattctcttctgccaaaccaggttccggttccacagcttcctgtccagtctgcgacttcccctgacctgaacccaccccaggacccttacagaggcatgccaccaggactacaggggcagagtgtctcctctggcagctctgagatcaaatccgatgacgagggtgatgagaacctgcaagacacgaaatcttcggaggacaagaaattagatgacgacaagaaggatatcaaatcaattactagcaataatgacgatgaggacctgacaccagagcagaaggcagagcgtgagaaggagcggaggatggccaacaatgcccgagagcgtctgcgggtccgtgacatcaacgaggctttcaaagagctcggccgcatggtgcagctccacctcaagagtgacaagccccagaccaagctcctgatcctccaccaggcggtggccgtcatcctcagtctggagcagcaagtccgagaaaggaatctgaatccgaaagctgcgtgtctgaaaagaagggaggaagagaaggtgtcctcagagcctccccctctctccttggccggcccacaccctggaatgggagacgcatcgaatcacatgggacagatgtaaaagggtccaagttgccacattgcttcattaaaacaagagaccacttccttaacagctgtattatcttaaacccacataaacacttctccttaacccccatttttgtaatataagacaagtctgagtagttatgaatcgcagacgcaagaggtttcagcattcccaattatcaaaaaacagaaaaacaaaaaaaagaaagaaaaaagtgcaacttgagggacgactttctttaacatatcattcagaatgtgcaaagcagtatgtacaggctgagacacagcccagagactgaacggc

SEQ ID NO: 10 - DNA, 7110 bp, Homo sapiens
cttccaataaaaacaggacagcagaacacacataccaaagtcagtactgagcacaacaaggaatgtctaatcaatatttccaaatacaagttttctttggttataagcggcctcactactattttaaagaatgttaacaatatgcaaccaaaggacacaatgagattagatgaaacgatgctggtcaaacagttgctgccagaaatctgccattttcttcacacctgtcgtgaaggaaaccagcatgcagctgaacttcggaattctgcctctggggttttattttctctcagctgcaacaacttcaatgcagtctttagtcgcatttctaccaggttacaggaattaactgtttgttcagaagacaatgttgatgttcatgatatagaattgttacagtatatcaatgtggattgtgcaaaattaaaacgactcctgaaggaaacagcatttaaatttaaagccctaaagaaggttgcgcagttagcagttataaatagcctggaaaaggcattttggaactgggtagaaaattatccagatgaatttacaaaactataccagatcccacagactgatatggctgaatgtgcagaaaagctatttgacttggtggatggttttgctgaaagcaccaaacgtaaagcagcagtttggccactacaaatcattctccttatcttgtgtccagaaataatccaggatatatccaaagacgtggttgatgaaaacaacatgaataagaagttatttctggacagtctacgaaaagctcttgctggccatggaggaagtaggcagctgacagaaagtgctgcaattgcctgtgtcaaactgtgtaaagcaagtacttacatcaattgggaagataactctgtcattttcctacttgttcagtccatggtggttgatcttaagaacctgctttttaatccaagtaagccattctcaagaggcagtcagcctgcagatgtggatctaatgattgactgccttgtttcttgctttcgtataagccctcacaacaaccaacactttaagatctgcctggctcagaattcaccttctacatttcactatgtgctggtaaattcactccatcgaatcatcaccaatagtcttacatttaaagaaaaagtaacaagccttaaatttaaagaaaaacctacagacctggagacaagaagctataagtatcttctcttgtccatggtgaaactaattcatgcagatccaaagctcttgctttgtaatccaagaaaacaggggcccgaaacccaaggcagtacagcagaattaattacagggctcgtccaactggtccctcagtcacacatgccagagattgctcaggaagcaatggaggatagtgcagcaggatgcagcggaacccccccgatttgccgacaagcccagaccaaactagaagtggccctgtacatgtttctgtggaaccctgacactgaagctgttctggttgccatgtcctgtttccgccacctctgtgaggaagcagatatccggtgtggggtggatgaagtgtcagtgcataacctcttgcccaactataacacattcatggagtttgcctctgtcagcaatatgatgtcaacaggaagagcagcacttcagaaaagagtgatggcactgctgaggcgcattgagcatcccactgcaggaaacactgaggcttgggaagatacacatgcaaaatgggaacaagcaacaaagctaatccttaactatccaaaagccaaaatggaagatggccaggctgctgaaagccttcacaagaccattgttaagaggcgaatgtcccatgtgagtggaggaggatccatagatttgtctgacacagactccctacaggaatggatcaacatgactggcttcctttgtgcccttgggggagtgtgcctccagcagagaagcaattctggcctggcaacctatagcccacccatgggtccagtcagtgaacgtaagggttctatgatttcagtgatgtcctcagagggaaacgcagatacacctgtcagcaaatttatggatcggctgttgtccttaatggtgtgtaaccatgagaaagtgggacttcaaatacggaccaatgttaaggatctggtgggtctagaattgagtcctgctctgtatccaatgctatttaacaaattgaagaataccatcagcaagttttttgactcccaaggacaggttttattgactgataccaatactcaatttgtagaacaaaccatagctataatgaagaacttgctagataatcatactgaaggcagctctgaacatctagggcaagctagcattgaaacaatgatgttaaatctggtcaggtatgttcgtgtgcttgggaatatggtccatgcaattcaaataaaaacgaaactgtgtcaattagttgaagtaatgatggcaaggagagatgacctctcattttgccaagagatgaaatttaggaataagatggtagaatacctgacagactgggttatgggaacatcaaaccaagcagcagatgatgatgtaaaatgtcttacaagatacttcacattatttatgaaccttttgaatgactgcagtgaagttgaagatgaaagtgcgcaaacaggtggcaggaaacgtggcatgtctcggaggctggcatcactgaggcactgtacggtccttgcaatgtcaaacttactcaatgccaacgtagacagtggtctcatgcactccataggcttaggttaccacaaggatctccagacaagagctacatttatggaagttctgacaaaaatccttcaacaaggcacagaatttgacacacttgcagaaacagtattggctgatcggtttgagagattggtggaactggtcacaatgatgggtgatcaaggagaactccctatagcgatggctctggccaatgtggttccttgttctcagtgggatgaactagctcgagttctggttactctgtttgattctcggcatttactctaccaactgctctggaacatgttttctaaagaagtagaattggcagactccatgcagactctcttccgaggcaacagcttggccagtaaaataatgacattctgtttcaaggtatatggtgctacctatctacaaaaactcctggatcctttattacgaattgtgatcacatcctctgattggcaacatgttagctttgaagtggatcctaccaggttagaaccatcagagagccttgaggaaaaccagcggaacctccttcagatgactgaaaagttcttccatgccatcatcagttcctcctcagaattcccccctcaacttcgaagtgtgtgccactgtttataccaggtggttagccagcgtttccctcagaacagcatcggtgcagtaggaagtgccatgttcctcagatttatcaatcctgccattgtctcaccgtatgaagcagggattttagataaaaagccaccacctagaatcgaaaggggcttgaagttaatgtcaaagatacttcagagtattgccaatcatgttctcttcacaaaagaagaacatatgcggcctttcaatgattttgtgaaaagcaactttgatgcagcacgcaggtttttccttgatatagcatctgattgtcctacaagtgatgcagtaaatcatagtctttccttcataagtgacggcaatgtgcttgctttacatcgtctactctggaacaatcaggagaaaattgggcagtatctttccagcaacagggatcataaagctgttggaagacgaccttttgataagatggcaacacttcttgcatacctgggtcctccagagcacaaacctgtggcagatacacactggtccagccttaaccttaccagttcaaagtttgaggaatttatgactaggcatcaggtacatgaaaaagaagaattcaaggctttgaaaacgttaagtattttctaccaagctgggacttccaaagctgggaatcctattttttattatgttgcacggaggttcaaaactggtcaaatcaatggtgatttgctgatataccatgtcttactgactttaaagccatattatgcaaagccatatgaaattgtagtggaccttacccataccgggcctagcaatcgctttaaaacagactttctctctaagtggtttgttgtttttcctggctttgcttacgacaacgtctccgcagtctatatctataactgtaactcctgggtcagggagtacaccaagtatcatgagcggctgctgactggcctcaaaggtagcaaaaggcttgttttcatagactgtcctgggaaactggctgagcacatagagcatgaacaacagaaactacctgctgccaccttggctttagaagaggacctgaaggtattccacaatgctctcaagctagctcacaaagacaccaaagtttctattaaagttggttctactgctgtccaagtaacttcagcagagcgaacaaaagtcctagggcaatcagtctttctaaatgacatttattatgcttcggaaattgaagaaatctgcctagtagatgagaaccagttcaccttaaccattgcaaaccagggcacgccgctcaccttcatgcaccaggagtgtgaagccattgtccagtctatcattcatatccggacccgctgggaactgtcacagcccgactctatcccccaacacaccaagattcggccaaaagatgtccctgggacactgctcaatatcgcattacttaatttaggcagttctgacccgagtttacggtcagctgcctataatcttctgtgtgccttaacttgtacctttaatttaaaaatcgagggccagttactagagacatcaggtttatgtatccctgccaacaacaccctctttattgtctctattagtaagacactggcagccaatgagccacacctcacgttagaatttttggaagagtgtatttctggatttagcaaatctagtattgaattgaaacacctttgtttggaatacatgactccatggctgtcaaatctagttcgtttttgcaagcataatgatgatgccaaacgacaaagaattacagatctgcttgatgttgtactagacagtttcatcaaaaccagtgcaacaggtggcttgggatcaataaaagctgaggtgatggcagatactgctgtagctttggcttctggaaatgtgaaattggtttcaagcaaggttattggaaggatgtgcaaaataattgacaagacatgcttatctccaactcctactttagaacaacatcttatgtgggatgatattgctattttagcacgctacatgctgatgctgtccttcaacaattcccttgatgtggcagctcatcttccctacctcttccacgttgttactttcttagtagccacagaagagaccaagcaagttttgagactcagtctgacagagttctcattacccaaattttacttgctgtttggcattagcaaagtcaagtcagctgctgtcattgccttccgttccagttaccgggacaggtcattctctcctggctcctatgagagagagacttttgctttgacatccttggaaacagtcacagaagctttgttggagatcatggaggactcgcctctgcacaaagccctcttttgggtagctgtggctgtgctgcagcttgatgaggtcaacttgtattcagcaggtaccgcacttcttgaacaaaacctgcatactttagatagtctccgtatattcaatgacaagagtccagaggaagtatttatggcaatccggaatcctctggagtggcactgcaagcaaatggatcattttgttggactcaatttcaactctaactttaactttgcattggttggacaccttttaaaagctttacttacagtgtctgaagaagttcgaagtcgctgcagcctaaaacatagaaagtcacttcttcttactgatatttcaatggaaaatgttcctatggatacatatcccattcatcatggtgacccttcctataggacactaaaggagactcagccatggtcctctcccaaaggttctgaaggataccttgcagccacctatccaactgtcggccagaccagtccccgagccaggaaatccatgagcctggacatggggcaaccttctcaggccaacactaagaagttgcttggaacaaggaaaagttttgatcacttgatatcagacacaaaggctcctaaaaggcaagaaatggaatcagggatcacaacaccccccaaaatgaggagagtagcagaaactgattatgaaatggaaactcagaggatttcctcatcacaacagcacccacatttacgtaaagtttcagtgtctgaatcaaatgttctcttggatgaagaagtacttactgatccgaagatccaggcgctgcttcttactgttctagctacactggtaaaatataccacagatgagtttgatcaacgaattctttatgaatacttagcagaggccagtgttgtgtttcccaaagtctttcctgttgtgcataatttgttggactctaagatcaacaccctgttatcattgtgccaagatccaaatttgttaaatccaatccatggaattgtgcagagtgtggtgtaccatgaagaatccccaccacaataccaaacatcttacctgcaaagttttggttttaatggcttgtggcggtttgcaggaccgttttcaaagcaaacacaaattccagactatgctgagcttattgttaagtttcttgatgccttgattgacacgtacctgcctggaattgatgaagaaaccagtgaagaatccctcctgactcccacatctccttaccctcctgcactgcagagccagcttagtatcactgccaaccttaacctttctaattccatgacctcacttgcaacttcccagcattccccaggaatcgacaaggagaacgttgaactctcccctaccactggccactgtaacagtggacgaactcgccacggatccgcaagccaagtgcagaagcaaagaagcgctggcagtttcaaacgtaatagcattaagaagatcgtgtga

SEQ ID NO: 11 - DNA, 3912 bp, Homo sapiens
atggaggtctcccggaggaaggcgccgccgcgccccccgcgccccgcagcgccactgcccctgctcgcctatctgctggcactggcggctcccggccggggcgcggacgagcccgtgtggcggtcggagcaagccatcggagccatcgcggcgagccaggaggacggcgtgtttgtggcgagcggcagctgcctggaccagctggactacagcctggagcacagcctctcgcgcctgtaccgggaccgagcgggcaactgcacagagccgggctcgacggccggcgtggtgtaccgcgcgggccggaacaaccgctggtacctggcggtggccgccacctacgtgctgcctgagccggagacggcgagccgctgcaaccccgcggcatccgaccacgacacggccatcgcgctcaaggacacggaggggcgcagcctggccacgcaggagctggggcgcctcaagctgtgcgagggcgcgggcagcctgcacttcgtggacgcctttctctggaacggcagcatctacttcccctactacccctacaactatacgagcggcgctgccaccggctggcccagcatggcgcgcatcgcgcagagcaccgaggtgctgttccagggccaggcatccctcgactgcggccacggccaccccgacggccgccgcctgctcctctcctccagcctagtggaggccctggacgtctgggcgggagtgttcagcgcggccgctggagagggccaggagcggcgctcccccaccaccacggcgctctgcctcttcagaatgagtgagatccaggcgcgcgccaagagggtcagctgggacttcaagacggccgagagccactgcaaagaaggggatcaacctgaaagagtccaaccaatcgcatcatctaccttgatccattccgacctgacatccgtttatggcaccgtggtaatgaacaggactgttttattcttggggactggagatggccagttacttaaggtgaggagaattcgtgttgcaaactgcaataaacataaatcctgttcggagtgtttaacagccacagaccctcactgcggttggtgccattcgctacaaaggtgcacttttcaaggagattgtgtacattcagagaacttagaaaactggctggatatttcgtctggagcaaaaaagtgccctaaaattcagataattcgaagcagtaaagaaaagactacagtgactatggtgggaagcttctctccaagacactcaaagtgcatggtgaagaatgtggactctagcagggagctctgccagaataaaagtcagcccaaccggacctgcacctgtagcatcccaaccagagcaacctacaaagatgtttcagttgtcaacgtgatgttctccttcggttcttggaatttatcagacagattcaactttaccaactgctcatcattaaaagaatgcccagcatgcgtagaaactggctgcgcgtggtgtaaaagtgcaagaaggtgtatccaccccttcacagcttgcgacccttctgattatgagagaaaccaggaacagtgtccagtggctgtcgagaagacatcaggaggaggaagacccaaggagaacaaggggaacagaaccaaccaggctttacaggtcttctacattaagtccattgagccacagaaagtatcgacattagggaaaagcaacgtgatagtaacgggagcaaactttacccgggcatcgaacatcacaatgatcctgaaaggaaccagtacctgtgataaggatgtgatacaggttagccatgtgctaaatgacacccacatgaaattctctcttccatcaagccggaaagaaatgaaggatgtgtgtatccagtttgatggtgggaactgctcttctgtgggatccttatcctacattgctctgccacattgttcccttatatttcctgctaccacctggatcagtggtggtcaaaatataaccatgatgggcagaaattttgatgtaattgacaacttaatcatttcacatgaattaaaaggaaacataaatgtctctgaatattgtgtggcgacttactgcgggtttttagcccccagtttaaagagttcaaaagtgcgcacgaatgtcactgtgaagctgagagtacaagacacctacttggattgtggaaccctgcagtatcgggaggaccccagattcacggggtatcgggtggaatccgaggtggacacagaactggaagtgaaaattcaaaaagaaaatgacaacttcaacatttccaaaaaagacattgaaattactctcttccatggggaaaatgggcaattaaattgcagttttgaaaatattactagaaatcaagatcttaccaccatcctttgcaaaattaaaggcatcaagactgcaagcaccattgccaactcttctaagaaagttcgggtcaagctgggaaacctggagctctacgtcgagcaggagtcagttccttccacatggtattttctgattgtgctccctgtcttgctagtgattgtcatttttgcggccgtgggggtgaccaggcacaaatcgaaggagctgagtcgcaaacagagtcaacaactagaattgctggaaagcgagctccggaaagagatacgtgacggctttgctgagctgcagatggataaattggatgtggttgatagttttggaactgttcccttccttgactacaaacattttgctctgagaactttcttccctgagtcaggtggcttcacccacatcttcactgaagatatgcataacagagacgccaacgacaagaatgaaagtctcacagctttggatgccctaatctgtaataaaagctttcttgttactgtcatccacacccttgaaaagcagaagaacttttctgtgaaggacaggtgtctgtttgcctccttcctaaccattgcactgcaaaccaagctggtctacctgaccagcatcctagaggtgctgaccagggacttgatggaacagtgtagtaacatgcagccgaaactcatgctgagacgcacggagtccgtcgtcgaaaaactcctcacaaactggatgtccgtctgcctttctggatttctccgggagactgtcggagagcccttctatttgctggtgacgactctgaaccagaaaattaacaagggtcccgtggatgtaatcacttgcaaagccctgtacacacttaatgaagactggctgttgtggcaggttccggaattcagtactgtggcattaaacgtcgtctttgaaaaaatcccggaaaacgagagtgcagatgtctgtcggaatatttcagtcaatgttctcgactgtgacaccattggccaagccaaagaaaagattttccaagcattcttaagcaaaaatggctctccttatggacttcagcttaatgaaattggtcttgagcttcaaatgggcacacgacagaaagaacttctggacatcgacagttcctccgtgattcttgaagatggaatcaccaagctaaacaccattggccactatgagatatcaaatggatccactataaaagtctttaagaagatagcaaattttacttcagatgtggagtactcggatgaccactgccatttgattttaccagattcggaagcattccaagatgtgcaaggaaagagacatcgagggaagcacaagttcaaagtaaaagaaatgtatctgacaaagctgctgtcgaccaagaaacatgaaaatgaatttaatgaagaagtggccttgacagaaatttacaaatacatcgtaaaatattttgatgagattctaaataaactagaaagagaacgagggctggaagaagctcagaaacaactcttgcatgtaaaagtcttatttgatgaaaagaagaaatgcaagtggatgtaa

SEQ ID NO: 12 - DNA, 3759 bp, Homo sapiens
cacggagatagacagctttggagctgctgaactccgagcacagggtgaagaccccggcgctaccaaccacagcctggcagcctggtctccgcggcacccactggggctgcatccccctcccccgagagggctgcgcaggcgggaagacgcccagaggccagcttcggtcccccttctgtctctcggttcctctttcctcccaagtaagggaataaaccgcgaagaaggagcgccccgggccaccgcgcaaccaagtgttgcctggtgaggaagagccaggacttctgaatttaccttgaatacagacaggaggatgttgcctaaggaatagcagagatcttgtctcatcttctgagaggtgcctgctgctgctgtatacacttgagtgctcccagaagtctcctgaaaggcttacatcgcaaacctgcaatgagccaggccctgggctgggcctccacttcagcctagtgaacaaaactccatcactgccctttagccactcacataaagtttaaaaatgggtgaagaacggtgggtctccctcactccagaagaatttgaccaactccagaaatattcagaatattcctccaagaagataaaagatgccttgactgaatttaatgagggtgggagcctcaaacaatatgacccacatgagccgattagctatgatgtcttcaagctgttcatgagggcgtacctggaggtggaccttccccagccactgagcactcacctcttcctggccttcagccagaagcccagacacgagacctctgaccacccgacggagggagccagcaacagtgaggccaacagcgcagatactaatatacagaatgcagataatgccaccaaagcagacgaggcctgtgcccctgatactgaatcaaatatggctgagaagcaagcaccagctgaagaccaagtggctgcgacccccctggaaccccccgtccctcggtcttcaagctcggaatccccagtggtgtacctgaaggatgttgtgtgctacctgtccctgctggagacggggaggcctcaggataagctggagttcatgtttcgcctctatgattcagatgagaacggtctcctggaccaagcggagatggattgcattgtcaaccaaatgctgcatattgcccagtacctggagtgggatcccacagagctgaggcctatattgaaggagatgctgcaagggatggactacgaccgggacggctttgtgtctctacaggaatgggtccatggagggatgaccaccatcccattgctggtcctcctggggatggatgactctggctccaagggggatgggcggcacgcctggaccatgaagcacttcaagaaaccaacctactgcaacttctgccatatcatgctcatgggcgtccgcaagcaaggcctgtgctgcacttactgtaaatacactgtccacgaacgctgtgtgtccaaaaacattcctggttgtgtcaaaacgtactcaaaagccaaaaggagtggtgaggtgatgcagcacgcatgggtggaagggaactcctccgtcaagtgtgaccggtgccacaaaagtatcaagtgctaccagagtgtcaccgcgcggcactgcgtgtggtgccggatgacgtttcaccgcaaatgtgaattatcaacgttgtgtgacggtggggaactcagagaccacatcttactgcccacctccatatgccccatcacccgggacaggccaggtgagaagtctgatggctgcgtgtccgccaagggcgaacttgtcatgcagtataagatcatccccaccccgggtacccaccccctgctggtcttggtgaaccccaagagtggagggagacaaggagaaagaattcttcggaaattccactatctgctcaaccccaaacaagttttcaacctggacaatggggggcctactccagggttgaactttttccgtgatactccagacttccgtgttttggcctgtggtggagatgggacagttggctggattttggattgcattgataaggccaactttgcaaagcatccaccagtggctgtcctgcctcttggaacaggaaatgaccttgcccgttgtctccgctggggaggaggttatgaagggggcagcttgacaaaaatcctgaaagacattgagcagagccccttggtgatgctggaccgctggcatctggaagtcatccccagagaggaagtggaaaacggggaccaggtcccatacagcatcatgaacaactatttctccattggtgtggacgcttccattgcacacagattccatgtgatgagagagaaacatcctgaaaaattcaacagcaggatgaagaacaagctgtggtactttgaatttggcacctcggagacttttgcagcgacctgcaagaaactccacgaccacattgagttggagtgtgatggggttggggtggacctgagcaacatcttcctggaaggcattgccattctcaacattcccagcatgtacggaggcaccaatctctggggagaaaacaagaagaaccgggctgtgatccgggaaagcaggaagggtgtcactgaccccaaagaactgaaattctgcgttcaagacctcagtgaccagctccttgaagtggtggggctagaaggagccatggagatggggcagatctacaccggcctgaagagtgcaggcaggaggctggcccagtgcgcctctgtcaccatcaggacaaacaagctgctgccaatgcaagtggatggagaaccctggatgcagccatgttgcacgattaaaattactcacaagaaccaagcgcccatgatgatggggcctccccagaagagcagcttcttctcgttgagaaggaagagccgttcaaaagactaaacagtgtgccaaacaccagctaaaccaagagagaaagcaagaaactataatgcacactcacacacaatttatgtgcacactcacacatgcacacacacacacacatacacactcttctctaaccagtggaagcaaagccacccttcgggaagaaaacgtcaccttgccatacattctgtttcaacagtgggtacacccctaacagagccagtgccaacaaaacattttgaatggacttagggcccatgaggttgtggctggcttaggcagcaacctccacattcccacaggccttgagcagaattttctgagactgaagggaaatcccgctttctttctaccagccctgcaagtttcctcatggacgctcgcgaggagcaggctgcaggtttcctgcctatggtgagatcagatgggccaagggaaggagctctggttccagagaatttgcacaaagttccctctgtacagagacaaaacggcctccggctctcagagcataatccttggcagggctcagcaggcgcacgttggtttcttggtcgtcctttgagtgacaacttctccgtgaacctgctgaagaggcagaaaggctgtggaaagctgtatttccattcttgggtttctgcgccgtcggtgggcacttgttattttccaggaaccttctcctggtgtctacatgtttgcttagaggcggctccaagagcccccagagctgcctgcatagcacaccttagatgtggtatttattttcttagttctgtgaacacctgggagggagagcggagaaactgggatttatttttcaaattggtgtcataatattgtgtaaaaagggaaggaaaaaaaaaaccacccccagcttc

SEQ ID NO: 13 - DNA, 797 bp, Homo sapiens
ctatcggcaggaccctcatcccccgttactttagcactgtgtttgaaggaggggtgaccgacctgtattacattctcaaacactcgaaagagtcataccacaactcatccatcacggtggactgcgaccagtgtaccatggtcacccagcacgggaagcccatgtttaccaaggtatgtacagaaggcagactgatcttggagttcacctttgatgatctcatgagaatcaaaacatggcactttaccattagacaataccgagagttagtcccgagaagcatcctagccatgcatttgtgtgtaatattggagccaatgcaggaactgatgtcgagacataaaacttacaacctcagtccccgagactgcctgaagacctgcttgtttcagaagtggcagaggatggtggctccgccagcagaacccacaaggcaaccaacaaccaaacggagaaaaaggaaaaattccaccagcagcacttccaacagcagcgctgggaacaatgcaaacagcactggcagcaagaagaagaccacagctgcaaacctgagtctgtccagtcaggatgtgatggtggtaggagagccaactctgatgggaggtgagtttggggacgaggacgaaaggctaatcactagattagaaaacacgcaatatgatgcggccaacggcatggacgacgaggaggacttcaacaattcacccgcgctggggaacaacagcccgtggaacagtaaacctcccgccactcaagagaccaaatcagaaaaccccccaccccaggcttcccaataa

SEQ ID NO: 14 - DNA, 2653 bp, Homo sapiens
cccgggcggagggggcgggaagagcgcgtcctggccaagccgagtagtgtcttccactcggtgcgtctctctaggagccgcgcgggaaggatgctggtccgcaggggcgcgcgcgcagggcccaggatgccgcggggctggaccgcgctttgcttgctgagtttgctgccttctgggttcatgagtcttgacaacaacggtactgctaccccagagttacctacccagggaacattttcaaatgtttctacaaatgtatcctaccaagaaactacaacacctagtacccttggaagtaccagcctgcaccctgtgtctcaacatggcaatgaggccacaacaaacatcacagaaacgacagtcaaattcacatctacctctgtgataacctcagtttatggaaacacaaactcttctgtccagtcacagacctctgtaatcagcacagtgttcaccaccccagccaacgtttcaactccagagacaaccttgaagcctagcctgtcacctggaaatgtttcagacctttcaaccactagcactagccttgcaacatctcccactaaaccctatacatcatcttctcctatcctaagtgacatcaaggcagaaatcaaatgttcaggcatcagagaagtgaaattgactcagggcatctgcctggagcaaaataagacctccagctgtgcggagtttaagaaggacaggggagagggcctggcccgagtgctgtgtggggaggagcaggctgatgctgatgctggggcccaggtatgctccctgctccttgcccagtctgaggtgaggcctcagtgtctactgctggtcttggccaacagaacagaaatttccagcaaactccaacttatgaaaaagcaccaatctgacctgaaaaagctggggatcctagatttcactgagcaagatgttgcaagccaccagagctattcccaaaagaccctgattgcactggtcacctcgggagccctgctggctgtcttgggcatcactggctatttcctgatgaatcgccgcagctggagccccacaggagaaaggctggagctggaaccctgaccactcttcaggaagaaaggagtctgcacatgcagctgcaccctccctccgatccttcctcccacctccccctcccccttctcccacccctgcccccacttcctgtttgggcccctctcccatccagtgtctcacagccctgcttaccagataatgctactttatttatacactgtctagggcgaagacccttattacacggaaaacggtggaggccagggctatagctcaggacctgggacctcccctgaggctcagggaaaggccagtgtgaaccgaggggctcaggaaaacgggaccggccaggccacctccagaaacggccattcagcaagacaacacgtggtggctgataccgaattgtgactcggctaggtggggcaaggctgggcagtgtccgagagagcacccctctctgcatctgaccacgtgctacccccatgctggaggtgacatctcttacgcccaacccttccccactgcacacacctcagaggctgttcttggggccctacaccttgaggaggggcaggtaaactcctgtcctttacacattcggctccctggagccagactctggtcttctttgggtaaacgtgtgacgggggaaagccaaggtctggagaagctcccaggaacaactgatggccttgcagcactcacacaggacccccttcccctaccccctcctctctgccgcaatacaggaacccccaggggaaagatgagcttttctaggctacaattttctcccaggaagctttgatttttaccgtttcttccctgtattttctttctctactttgaggaaaccaaagtaaccttttgcacctgctctcttgtaatgatatagccagaaaaacgtgttgccttgaaccacttccctcatctctcctccaagacactgtggacttggtcaccagctcctcccttgttctctaagttccactgagctccatgtgccccctctaccatttgcagagtcctgcacagttttctggctggagcctagaacaggcctcccaagttttaggacaaacagctcagttctagtctctctggggccacacagaaactctttttgggctcctttttctccctctggatcaaagtaggcaggaccatgggaccaggtcttggagctgagcctctcacctgtactcttccgaaaaatcctcttcctctgaggctggatcctagccttatcctctgatctccatggcttcctcctccctcctgccgactcctgggttgagctgttgcctcagtcccccaacagatgcttttctgtctctgcctccctcaccctgagccccttccttgctctgcacccccatatggtcatagcccagatcagctcctaacccttatcaccagctgcctcttctgtgggtgacccaggtccttgtttgctgttgatttctttccagaggggttgagcagggatcctggtttcaatgacggttggaaatagaaatttccagagaagagagtattgggtagatattttttctgaatacaaagtgatgtgtttaaatactgcaattaaagtgatactgaaacactaaaaaaaaaa

SEQ ID NO: 15 - DNA, 2643 bp, Homo sapiens
aggagtagctcggagaggaggaaggagaagtcccgggatgctgcgcggtgccggcggagcaaggagacggaggtgttctatgagctggcccatgagctgcctctgccccacagtgtgagctcccatctggacaaggcctccatcatgcgactggcaatcagcttcctgcgaacacacaagctcctctcctcagtttgctctgaaaacgagtccgaagccgaagctgaccagcagatggacaacttgtacctgaaagccttggagggtttcattgccgtggtgacccaagatggcgacatgatctttctgtcagaaaacatcagcaagttcatgggacttacacaggtggagctaacaggacatagtatctttgacttcactcatccctgcgaccatgaggagattcgtgagaacctgagtctcaaaaatggctctggttttgggaaaaaaagcaaagacatgtccacagagcgggacttcttcatgaggatgaagtgcacggtcaccaacagaggccgtactgtcaacctcaagtcagccacctggaaggtcttgcactgcacgggccaggtgaaagtctacaacaactgccctcctcacaatagtctgtgtggctacaaggagcccctgctgtcctgcctcatcatcatgtgtgaaccaatccagcacccatcccacatggacatccccctggatagcaagaccttcctgagccgccacagcatggacatgaagttcacctactgtgatgacagaatcacagaactgattggttaccaccctgaggagctgcttggccgctcagcctatgaattctaccatgcgctagactccgagaacatgaccaagagtcaccagaacttgtgcaccaagggtcaggtagtaagtggccagtaccggatgctcgcaaagcatgggggctacgtgtggctggagacccaggggacggtcatctacaaccctcgcaacctgcagccccagtgcatcatgtgtgtcaactacgtcctgagtgagattgagaagaatgacgtggtgttctccatggaccagactgaatccctgttcaagccccacctgatggccatgaacagcatctttgatagcagtggcaagggggctgtgtctgagaagagtaacttcctattcaccaagctaaaggaggagcccgaggagctggcccagctggctcccaccccaggagacgccatcatctctctggatttcgggaatcagaacttcgaggagtcctcagcctatggcaaggccatcctgcccccgagccagccatgggccacggagttgaggagccacagcacccagagcgaggctgggagcctgcctgccttcaccgtgccccaggcagctgccccgggcagcaccacccccagtgccaccagcagcagcagcagctgctccacgcccaatagccctgaagactattacacatctttggataacgacctgaagattgaagtgattgagaagctcttcgccatggacacagaggccaaggaccaatgcagtacccagacggatttcaatgagctggacttggagacactggcaccctatatccccatggacggggaagacttccagctaagccccatctgccccgaggagcggctcttggcggagaacccacagtccaccccccagcactgcttcagtgccatgacaaacatcttccagccactggcccctgtagccccgcacagtcccttcctcctggacaagtttcagcagcagctggagagcaagaagacagagcccgagcaccggcccatgtcctccatcttctttgatgccggaagcaaagcatccctgccaccgtgctgtggccaggccagcacccctctctcttccatggggggcagatccaatacccagtggcccccagatccaccattacattttgggcccacaaagtgggccgtcggggatcagcgcacagagttcttgggagcagcgccgttggggccccctgtctctccaccccatgtctccaccttcaagacaaggtctgcaaagggttttggggctcgaggccagacgtgctgagtccggccatggtagccctctccaacaagctgaagctgaagcgacagctgagtatgaagagcaagccttccaggacctgagcgggggggacccacctggtggcagcacctcacatttgatgtggaaacggatgaagaacctcaggggtgggagctgccctttgatgccggacaagccactgagcgcaaatgtacccaatgataagttcacccaaaaccccatgaggggcctgggccatcccctgagacatctgccgctgccacagcctccatctgccatcagtcccggggagaacagcaagagcaggttccccccacagtgctacgccacccagtaccaggactacagcctgtcgtcagcccacaaggtgtcaggcatggcaagccggctgctcgggccctcatttgagtcctacctgctgcccgaactgaccagatatgactgtgaggtgaacgtgcccgtgctgggaagctccacgctcctgcaaggaggggacctcctcagagccctggaccaggccacctgagccaggccttctacctgggcagcacctctgccgacgccgtcccaccagcttcactc

SEQ ID NO: 16 - DNA, 818 bp, Homo sapiens
gggagcccggcctggccagggcggagcggcgcccagtagggacccattcattgtgccggcgcctcactgggcacggggcccaagctgacggcgtgcacgggagcctgcggagcctgggtgggaagaacaggcccctggagggcacttgaccttaagcctcttttcctccgcagagaggaagcgggagaggagcccacgtcgcctgtcacccaatatctccagccgcgcagtcccgaagagtgtaagatgttcgcctgcgccaagctcgcctgcaccccctctctgatccgagctggatccagagttgcatacagaccaatttctgcatcagtgttatctcgaccagaggctagtaggactggagagggctctacggtatttaatggggcccagaatggtgtgtctcagctaatccaaagggagtttcagaccagtgcaatcagcagagacattgatactgctgccaaatttattggtgcaggtgctgcaacagtaggagtggctggttctggtgctggtattggaacagtctttggcagccttatcattggttatgccagaaacccttcgctgaagcagcagctgttctcatatgctatcctgggatttgccttgtctgaagctatgggtctcttttgtttgatggttgctttcttgattttgtttgccatgtaacaaattactgcttgacatgttggcattcatattaattacggatgtaattctgtgtatcttactgtgactccgaaaactgtagtattggtgtcatgggaatgtacgttatttccaaagtcatttcattaaagatgaaaacttta

SEQ ID NO: 17 - DNA, 1763 bp, Homo sapiens
cgcgactaaggctttttttttttctccctctgaacggttaggctatggctgcgataaaggccgtcaactccaaggctgaggtggcgcgggcccaggcagctttggctgtcaatatatgcgccgcccgagggctgcaggatgtgctgcggaccaacttgggtcctaaaggcaccatgaaaatgcttgtttctggtgcaggtgacatcaaactcaccaaagatggcaatgtgctgctcgatgagatgcaaattcaacatccaacagcttccttgatagcaaaagtagcaacagctcaggatgacgtcacaggagatggtactacttcaaatgttctaattattggagagttattaaaacaagctgacctgtacatttctgagggcctgcaccctagaataatagctgaaggatttgaagctgcaaagataaaagcacttgaagttttggaggaagttaaagtgacaaaggagatgaaaagaaaaatcctcttagatgtagctagaacatcattacaaactaaagttcatgctgaactggctgatgtcttaacagaggttgtggtggattctgttttggctgttagaagaccaggttaccctattgatctcttcatggtagaaataatggagatgaagcataaattaggaacagatacaaagttgatccaaggattagttttggatcatggtgcccgtcatccagatatgaagaagcgagtagaagatgcatttatccttatttgcaacgtttcactggaatatgaaaaaacagaggtgaactctggtttcttttataagactgcagaagagaaagagaaattggtaaaagctgaaagaaaatttattgaagatagagtacaaaaaataatagacctgaaggacaaagtctgtgctcagtcaaataaaggatttgtcgtcattaatcaaaagggaattgatccattttccttagattctcttgcaaaacatggaatagtagctcttcgcagagcaaaaagaagaaatatggaaagactctctcttgcttgtggtggaatggccgtgaattcttttgaagatctcactgtagattgcttgggacatgctggtcttgtgtatgagtatacattaggtgaagaaaagttcacttttattgaggagtgtgttaacccttgctctgttaccttgttggttaaaggaccaaataagcatactctcacacaagtcaaggatgccataagagatggacttcgtgctatcaaaaatgccattgaagatggttgtatggttcctggagctggtgcaattgaagtggcaatggctgaagctcttgttacatataagaacagtataaaaggaagagctcgtcttggagtccaagcttttgctgatgccttactcattattcccaaggttcttgctcagaatgctggttatgacccacaggaaacattagtaaaagttcaggctgagcatgtcgagtcaaaacaacttgtgggcgtagatttgaatacaggtgagccaatggtagcagcagatgcaggagtttgggataattattgtgtaaaaaaacaacttcttcactcttgcacagtgattgccaccaacattctcctggttgatgaaattatgcgagctgggatgtcttctctcaaatgatgattgaattcaaaatcaacccttctagaagatgaaatttagtacactttacatctgactactattgtgtagcctgagccattctgaatttctacacaataaatgcagtttatgtcttttgggtct

SEQ ID NO: 18 - DNA, 3806 bp, Homo sapiens
gcttgctctttgacatatatgaaggtcaaatcacggcaatcctgggtcacagtggagctggcaaatcttcactgctaaatattcttaatggattgtctgttccaacagaaggatcagttaccatctataataaaaatctctctgaaatgcaagacttggaggaaatcagaaagataactggcgtctgtcctcaattcaatgttcaatttgacatactcaccgtgaaggaaaacctcagcctgtttgctaaaataaaagggattcatctaaaggaagtggaacaagagattttgcttttagatgaaccaactactggattggatcccttttccagagatcaagtgtggagcctcctgagagagcgtagagcagatcatgtgatccttttcagtacccagtccatggatgaggctgacatcctggctgaatcaaatattgaagattttataaaatcactgaagcatcaaaatatacttttggaagtagatgactttgaaaacagaaatggtactgatggcctctcatacaatggagctatcatagtttctggtaaacaaaaggtggaactgaaaggctgcagttcagttttgggccacctggggtactgccctcaagagaacgtgctgtggcccatgctgacgttgagggaacacctggaggtgtatgctgccgtcaaggggctcaggaaagcggacgcgaggctcgccatcgcaagatgcattggctccatccaacacctgaaaaacaaacttggcaaggattacattctagagctaaaagtgaaggaaacgtctcaagtgactttggtccacactgagattctgaagcttttcccacaggctgcagggcaggaaaggctttcctggggtttgatgtatgctggcttcatccttatcatggccactttaatggctcttattgtaaaatctgcacaaattgtcgtcctgactggttttgtgatggtcttcaccctctttctcctctatggcctgtctttgataactttagctttcctgatgagtgtgttgataaagaaacctttccttacgggcttggttgtgtttctccttattgtcttttgggggatcctgggattcccagcattgtatacacatcttcctgcatttttggaatggactttgtgtcttcttagcccctttgccttcactgttgggatggcccagcttatacatttggactatgatgtgaattctaatgcccacttggattcttcacaaaatccatacctcataatagctactcttttcatgttggtttttgacacccttctgtatttggtattgacattatattttgacaaaattttgcccgctgaatatggacatcgatgttctcccttgtttttcctgaaatcctgtttttggtttcaacacggaagggctaatcatgtggtccttgagaatgaaacagattctgatcctacacctaatgactgttttgaaccagtgtctccagaattctgtgggaaggaagccatcagtggagctggaaaaactaccctgttaaacatacttagtgggttgtcagttccaacatcaggttcagtcactgtctataatcacacactttcaagaatggctgatatagaaaatatcagcaagttcactggattttgtccacaatccaatgtgcaatttggatttctcactgtgaaagaaaacctcaggctgtttgctaaaataaaagggattttgccacatgaagtggagaaagaggttttgctattggatgaaccgactgctggattggatcctctttcaaggcaccgaatatggaatctcctgaaagaggggaaatcagacagagtaattctcttcagcacccagtttatagatgaggctgacattctggcggacaggaaggtgttcatatccaatgggaagctgaagtgtgcaggctcttctctgttccttaagaagaaatggggcataggctaccatttaagtttgcatctgaatgaaaggtgtgatccagagagtataacatcactggttaagcagcacatctctgatgccaaattgacagcacaaagtgaagaaaaacttgtatatattttgcctttggaaaggacaaacaaatttccagaactttacagggatcttgatagatgttctaaccaaggcattgaggattatggtgtttccataacaactttgaatgaggtgtttctgaaattagaaggaaaatcaactattgatgaatcagatattggaatttggggacaattacaaactgatggggcaaaagatataggaagccttgttgagctggaacaagttttgtcttccttccacgaaacaaggaaaacaatcagtggcgtggcgctctggaggcagcaggtctgtgcaatagcaaaagttcgcttcctaaagttaaagaaagaaagaaaaagcctgtggactatattattgctttttggtattagctttatccctcaacttttggaacatctattctacgagtcatatcagaaaagttacccgtgggaactgtctccaaatacatacttcctctcaccaggacaacaaccacaggatcctctgacccatttactggtcatcaataagacagggtcaaccattgataactttttacattcactgaggcgacagaacatagctatagaagtggatgcctttggaactagaaatggcacagatgacccatcttacaatggtgctatcattgtgtcaggtgatgaaaaggatcacagattttcaatagcatgtaatacaaaacggctgaattgctttcctgtcctcctggatgtcattagcaatggactacttggaatttttaattcgtcagaacacattcagactgacagaagcacattttttgaaaaaaaagctcattcccagctacggatttcaggcctctacccttctgcatactggtttggccaagcactggtggatgtttccctgtactttttgatcctcctgctaatgcaaataatggattatatttttagcccagaggagattatatttataattcaaaacctgttaattcaagagaatgcgctgtggcccaacctgacagtgaggcagcacctggaggtgtacgctgccgtgaaaggtctcaggaaaggggacgcaatgatcgccatcacacggttagtggatgcgctcaagctgcaggaccagctgaaggctcccgtgaagaccttgtcagagggaataaagcgaaagctgtgctttgtgctgagcatcctggggaacccgtcagtggtgcttctggatgagccgtcgaccgggatggaccccgaggggcagcagcaaatgtggcaggtgattcgggccacctttagaaacacggagaggggcgccctcctgaccacccactacatggcagaggctgaggcggtgtgtgaccgagtggccatcatggtgtcaggaaggctgagatgtattggttccatccaacacctgaaaagcaaatttggcaaagactacctgctggagatgaagctgaagaacctggcacaaatggagcccctccatgcagagatcctgaggcttttcccccaggctgctcagcaggaaaggttctcctccctgatggtctataagttgcctgttgaggatgtgcgacctttatcacaggctttcttcaaattagagatagttaaacagagtttcgacctggaggagtacagcctctcacagtctaccctggagcaggttttcctggagctctccaaggagcaggagctgggtgatcttgaagaggactttgatccctcggtgaagtggaaactcctcctgcaggaagagccttaa

SEQ ID NO: 19 - DNA, 570 bp, Homo sapiens
gtgactgattttggcttagcggtgaagaagcaaagtaggagtgaagccatgctgcaggccacatgtgggactcctatctatatggctaaaagtgttttgaaacaacttatgaaagtagatcctgctcacagaatcacagctaaggaactactagataaccagtggttaacaggcaataaactttcttcggtgagaccaaccaatgtattagagatgatgaaggaatggaaaaataacccagaaagtgttgaggaaaacacaacagaagagaagaataagccgtccactgaagaaaagttgaaaagttaccaaccctggggaaatgtccctgagaccaattacacttcagatgaagaggaggaaaaacagtctactgcttatgaaaagcaatttcctgcaaccagtaaggacaactttgatatgtgcagttcaagtttcacatctagcaaactccttccagctgaaatcaagggagaaatggagaaaacccctgtgactccaagccaaggaacagcaaccaagtaccctgctaaatccggcgccctgtccagaaccaaaaagaaactctaa

SEQ ID NO: 20 - DNA, 1578 bp, Homo sapiens
ggaaggagtttcgacccgcgctggcgagtcatgagcgccaagtttcccactggcgcgcaaacttgagttacttttgagcgtggatactggcgaagaggctgcgggcggtattagcgtttgcagcgacttggctcgggcagctgacccaagtgtcctgtcttccttcctctgcttgtctctaggctctgaaactgcggagcggccaccggacgccttctggagcaggtagcagcatgcagccgcctccaagtctgtgcggacgcgccctggttgcgctggttcttgcctgcggcctgtcgcggatctggggagaggagagaggcttcccgcctgacagggccactccgcttttgcaaaccgcagagataatgacgccacccactaagaccttatggcccaagggttccaacgccagtctggcgcggtcgttggcacctgcggaggtgcctaaaggagacaggacggcaggatctccgccacgcaccatctcccctcccccgtgccaaggacccatcgagatcaaggagactttcaaatacatcaacacggttgtgtcctgccttgtgttcgtgctggggatcatcgggaactccacacttctgagaattatctacaagaacaagtgcatgcgaaacggtcccaatatcttgatcgccagcttggctctgggagacctgctgcacatcgtcattgacatccctatcaatgtctacaagctgctggcagaggactggccatttggagctgagatgtgtaagctggtgcctttcatacagaaagcctccgtgggaatcactgtgctgagtctatgtgctctgagtattgacagatatcgagctgttgcttcttggagtagaattaaaggaattggggttccaaaatggacagcagtagaaattgttttgatttgggtggtctctgtggttctggctgtccctgaagccataggttttgatataattacgatggactacaaaggaagttatctgcgaatctgcttgcttcatcccgttcagaagacagctttcatgcagttttacaagacagcaaaagattggtggctgttcagtttctatttctgcttgccattggccatcactgcatttttttatacactaatgacctgtgaaatgttgagaaagaaaagtggcatgcagattgctttaaatgatcacctaaagcagagacgggaagtggccaaaaccgtcttttgcctggtccttgtctttgccctctgctggcttccccttcacctcagcaggattctgaagctcactctttataatcagaatgatcccaatagatgtgaacttttgagctttctgttggtattggactatattggtatcaacatggcttcactgaattcctgcattaacccaattgctctgtatttggtgagcaaaagattcaaaaactgctttaaggctgggccacatgttggaaataagctagtaatgttgttttctgtcaatattgaatgtgatggtacagtaaaccaaaacccaacaatgtggccagaaagaaagagcaataataattaattcacacaccatatggattctatttataaatcac

SEQ ID NO: 21 - DNA, 3902 bp, Homo sapiens
cagtcgtttccacttgttccatgtgacacagaccagcctcaagacaagcccccagactggttcacaagctacctggagacgttcagagaacaagtggttaacgaaacggttgagaagcttgaacagaaattacatgaaaagcttgtcctccagaacccatccttgggttcttgtccctcagaagtctcaatgcctacttcagaagaaacattgtttttgccagaaaaccagttcagctggcatattgcttgcaacaactgccaaagaaggattgttggtgtccgctaccagtgtagcctatgcccatcctacaatatctgtgaagattgtgaagcagggccatatggccatgacactaaccacgtcctgctgaagttgcggagacctgttgtgggctcctctgaaccgttctgtcactcaaagtactctactcctcgtcttcctgctgctctggaacaagtcaggctccagaaacaggttgataagaactttcttaaagcagaaaagcaaaggttgcgagctgagaagaaacaacgtaaagcagaggtcaaggaacttaaaaagcagcttaaactccataggaaaattcacctgtggaattcaatccatggactccagagccccaagtctcctttaggccgacctgagagcttgctccagtctaataccctgatgctccctttgcagccctgtacctccgttatgccaatgctcagtgcagcatttgtggatgagaatttgcctgatgggactcaccttcagccaggaaccaagtttatcaaacactggaggatgaaaaatacaggaaatgtaaagtggagtgcagacacaaagctcaagttcatgtggggaaacctgactttggcttccacagaaaagaaggatgttttggttccctgcctcaaggccggccatgtgggagttgtatctgtggagttcattgccccagccttggagggaacgtatacttcccattggcgtctttctcacaaaggccagcaatttgggcctcgggtctggtgcagtatcatagtagatcctttcccctccgaagagagccctgataacattgaaaagggcatgatcagctcaagcaaaactgatgatctcacctgccagcaagaggaaacttttcttctggctaaagaagaaagacagcttggtgaagtgactgagcagacagaagggacagcagcctgcatcccacagaaggcaaaaaatgttgccagtgagagggagctctacatcccatctgtggatcttctgactgcccaggacctgctgtcctttgagctgttggatataaacattgttcaagagttggagagagtgccccacaacacccctgtggatgtgactccctgcatgtctcctctgccacatgacagtcctttaatagagaagccaggcttggggcagatagaggaagagaatgaaggggcaggatttaaagcacttcctgattctatggtgtcagtaaagaggaaggctgagaacattgcttctgtggaggaagcagaagaagacctgagtgggacccagtttgtgtgtgagacagtaatccgatcccttaccttggatgctgccccagaccacaaccctccttgcagacagaagtccttgcagatgacatttgccttgcctgaaggaccacttggaaatgagaaggaggagattatccatatcgctgaggaagaagctgtcatggaggaggaggaggatgaggaggatgaggaggaggaggatgagctcaaagatgaagttcaaagtcagtcctctgcttcctcagaggattacatcatcatcctgcctgagtgctttgataccagccgccccctgggggattctatgtacagctctgcgctctcacagccaggcctggagcgaggtgctgaaggcaagcctggggttgaggctgggcaggaaccagctgaggctggggaaagactccctggaggggagaaccagccacaggagcacagcataagtgacatcctcacgacctcacagactctggaaacagtgcccctaatcccagaggtagtggagcttccaccgtcactgcccaggagctctccttgtgtacatcatcatggttccccaggagtggatttaccagttaccataccagaagtttcttcagtccctgatcagatcagaggagagcccagaggctcatcaggacttgtaaacagcagacagaagagctatgaccactcaaggcaccatcatgggagcagcattgctggaggactggtgaagggggctttgtctgttgctgcctctgcatacaaggccctgtttgctgggccaccagtcactgcacagccaataatttctgaagatcagacagcagccctgatggcccgtctctttgaaatgggattctgtgacaggcagctgaacctacggctgctgaagaaacacaattacaatatcctgcaggttgtgacagaacttcttcagttaaacaacaacgactggtacagccaacgctattgaggagtgaccttgtattaaataactgcctgctgctcagtagtatgatctttattctgtcattggggtatgggatagaagcccttgcttatttttaatctgatgaatctgtatagagcccatcgttgagttaccaagacaatacctgctacagtattttggggagcaaactaaagaccagaacttaaattttcactttagacattggatgaatagtatgaagacagtttttcagttgatttggataaaactattttagtgcattgacaagtgtaacttcaacttcatatagaaccatttttctttctgcttttattgaaactgagtatttttctttggctaatgtggattttttatggggatatctgttaattttcaggttttgaaagacattaacctcggaagttgtttttaagaattattctcataattcttattctcataatttctgtaatccacctcaagcttcatagttatttggcattgaaataacacccagagcatgatagaaatgttgttactcttcctctctcaaggagaaagtaattttcctgcaatacttaataattggcaccgttgctttctaaagactccatggtgcattcaagagtatccaacttcaagggaatctccgcatttcaatgaaaggaggaagagtgtgctgataaacctaccagcacctattgagcaatgtctattatagtaattttgcatacatttttatttaagggaaaaaatataggtattgtgaaatattttgctaatcttatagaaaaggaaaaaatcccgttatttaaagggaaaagtaaatttaacagttgccttttttcttaatgtcagggcagatcttattttacagtacagtgggggaaatagaaaacatgtgaaaggcaaaaggcaggctcctaaattaatgtcagtgaagttcagggtgggcaaatgagtgtgtgtgaggtataggaaatgctgatgacttctttaatgcttgaagtccgttcacaggtatctagccctagaatgcctagaacaggaagaggcagctggtgttctgcaaaacttggacaggggcaaagttgctgaaaaagttttggtttaacccgaagataagtggaaaagagcttgtccatgaacccaggttctcactctgtttacagaagtgtgttgagtacagttggtgaaggaagaggtaacaaaaaatgctaaatattttatccatgaaaatgacttccagaaaaggaagaatatgaaccccagaccgaaggggaaaagatagttaatagtattatctaacctggttggtatttgtaatgaatggtgattttaattagtcattagccataatgatgtttatttacagtataactcctgaatgctacttaaataaaccaggattcaaactgcaa

SEQ ID NO: 22 - DNA, 4578 bp, Homo sapiens
ggtacaatacagtctgttctcctccagctccttctttctgcaacatggggaagaacaaactccttcatccaagtctggttcttctcctcttggtcctcctgcccacagacgcctcagtctctggaaaaccgcagtatatggttctggtcccctccctgctccacactgagaccactgagaagggctgtgtccttctgagctacctgaatgagacagtgactgtaagtgcttccttggagtctgtcaggggaaacaggagcctcttcactgacctggaggcggagaatgacgtactccactgtgtcgccttcgctgtcccaaagtcttcatccaatgaggaggtaatgttcctcactgtccaagtgaaaggaccaacccaagaatttaagaagcggaccacagtgatggttaagaacgaggacagtctggtctttgtccagacagacaaatcaatctacaaaccagggcagacagtgaaatttcgtgttgtctccatggatgaaaactttcaccccctgaatgagttgattccactagtatacattcaggatcccaaaggaaatcgcatcgcacaatggcagagtttccagttagagggtggcctcaagcaattttcttttcccctctcatcagagcccttccagggctcctacaaggtggtggtacagaagaaatcaggtggaaggacagagcaccctttcaccgtggaggaatttgttcttcccaagtttgaagtacaagtaacagtgccaaagataatcaccatcttggaagaagagatgaatgtatcagtgtgtggcctatacacatatgggaagcctgtccctggacatgtgactgtgagcatttgcagaaagtatagtgacgcttccgactgccacggtgaagattcacaggctttctgtgagaaattcagtggacagctaaacagccatggctgcttctatcagcaagtaaaaaccaaggtcttccagctgaagaggaaggagtatgaaatgaaacttcacactgaggcccagatccaagaagaaggaacagtggtggaattgactggaaggcagtccagtgaaatcacaagaaccataaccaaactctcatttgtgaaagtggactcacactttcgacagggaattcccttctttgggcaggtgcgcctagtagatgggaaaggcgtccctataccaaataaagtcatattcatcagaggaaatgaagcaaactattactccaatgctaccacggatgagcatggccttgtacagttctctatcaacaccaccaatgttatgggtacctctcttactgttagggtcaattacaaggatcgtagtccctgttacggctaccagtgggtgtcagaagaacacgaagaggcacatcacactgcttatcttgtgttctccccaagcaagagctttgtccaccttgagcccatgtctcatgaactaccctgtggccatactcagacagtccaggcacattatattctgaatggaggcaccctgctggggctgaagaagctctccttctattatctgataatggcaaagggaggcattgtccgaactgggactcatggactgcttgtgaagcaggaagacatgaagggccatttttccatctcaatccctgtgaagtcagacattgctcctgtcgctcggttgctcatctatgctgttttacctaccggggacgtgattggggattctgcaaaatatgatgttgaaaattgtctggccaacaaggtggatttgagcttcagcccatcacaaagtctcccagcctcacacgcccacctgcgagtcacagcggctcctcagtccgtctgcgccctccgtgctgtggaccaaagcgtgctgctcatgaagcctgatgctgagctctcggcgtcctcggtttacaacctgctaccagaaaaggacctcactggcttccctgggcctttgaatgaccaggacgatgaagactgcatcaatcgtcataatgtctatattaatggaatcacatatactccagtatcaagtacaaatgaaaaggatatgtacagcttcctagaggacatgggcttaaaggcattcaccaactcaaagattcgtaaacccaaaatgtgtccacagcttcaacagtatgaaatgcatggacctgaaggtctacgtgtaggtttttatgagtcagatgtaatgggaagaggccatgcacgcctggtgcatgttgaagagcctcacacggagaccgtacgaaagtacttccctgagacatggatctgggatttggtggtggtaaactcagcaggtgtggctgaggtaggagtaacagtccctgacaccatcaccgagtggaaggcaggggccttctgcctgtctgaagatgctggacttggtatctcttccactgcctctctccgagccttccagcccttctttgtggagctcacaatgccttactctgtgattcgtggagaggccttcacactcaaggccacggtcctaaactaccttcccaaatgcatccgggtcagtgtgcagctggaagcctctcccgccttcctagctgtcccagtggagaaggaacaagcgcctcactgcatctgtgcaaacgggcggcaaactgtgtcctgggcagtaaccccaaagtcattaggaaatgtgaatttcactgtgagcgcagaggcactagagtctcaagagctgtgtgggactgaggtgccttcagttcctgaacacggaaggaaagacacagtcatcaagcctctgttggttgaacctgaaggactagagaaggaaacaacattcaactccctactttgtccatcaggtggtgaggtttctgaagaattatccctgaaactgccaccaaatgtggtagaagaatctgcccgagcttctgtctcagttttgggagacatattaggctctgccatgcaaaacacacaaaatcttctccagatgccctatggctgtggagagcagaatatggtcctctttgctcctaacatctatgtactggattatctaaatgaaacacagcagcttactccagaggtcaagtccaaggccattggctatctcaacactggttaccagagacagttgaactacaaacactatgatggctcctacagcacctttggggagcgatatggcaggaaccagggcaacacctggctcacagcctttgttctgaagacttttgcccaagctcgagcctacatcttcatcgatgaagcacacattacccaagccctcatatggctctcccagaggcagaaggacaatggctgtttcaggagctctgggtcactgctcaacaatgccataaagggaggagtagaagatgaagtgaccctctccgcctatatcaccatcgcccttctggagattcctctcacagtcactcaccctgttgtccgcaatgccctgttttgcctggagtcagcctggaagacagcacaagaaggggaccatggcagccatgtatataccaaagcactgctggcctatgcttttgccctggcaggtaaccaggacaagaggaaggaagtactcaagtcacttaatgaggaagctgtgaagaaagacaactctgtccattgggagcgccctcagaaacccaaggcaccagtggggcatttttacgaaccccaggctccctctgctgaggtggagatgacatcctatgtgctcctcgcttatctcacggcccagccagccccaacctcggaggacctgacctctgcaaccaacatcgtgaagtggatcacgaagcagcagaatgcccagggcggtttctcctccacccaggacacagtggtggctctccatgctctgtccaaatatggagcagccacatttaccaggactgggaaggctgcacaggtgactatccagtcttcagggacattttccagcaaattccaagtggacaacaacaaccgcctgttactgcagcaggtctcattgccagagctgcctggggaatacagcatgaaagtgacaggagaaggatgtgtctacctccagacatccttgaaatacaatattctcccagaaaaggaagagttcccctttgctttaggagtgcagactctgcctcaaacttgtgatgaacccaaagcccacaccagcttccaaatctccctaagtgtcagttacacagggagccgctctgcctccaacatggcgatcgttgatgtgaagatggtctctggcttcattcccctgaagccaacagtgaaaatgcttgaaagatctaaccatgtgagccggacagaagtcagcagcaaccatgtcttgatttaccttgataaggtgtcaaatcagacactgagcttgttcttcacggttctgcaagatgtcccagtaagagatctgaaaccagccatagtgaaagtctatgattactacgagacggatgagtttgcaattgctgagtacaatgctccttgcagcaaagatcttggaaatgcttgaagaccacaaggctgaaaagtgctttgctggagtcctgttctcagagctccacagaagacacgtgtttttgtatctttaaagacttgatgaataaacactttttctggtc

SEQ ID NO: 23 - DNA, 4578 bp, Homo sapiens; identical to SEQ ID NO: 22

SEQ ID NO: 24 - DNA, 2296 bp, Homo sapiens
gaattcgtccaaactgaggatcacaagtctccacattctgagtaggaggatgagggtctgagttaggatttgggtcctgcagggcttgctaaggaatcccctgatggcctaggattccacgcagagcacatctggtgtgagagagctcgctgcaagggtgaaggctccgccctatcagatagacaaccaggccaccaagaggcccagccctccaaaccctggatttgcaacatcctcaaagaacagcaacgggccttgagcagaattgagaaggaaatacccccacctgccctcagccgttaagtgggctttgctattcacaagggcctctgggtgtcctggcagagaggggagatggcacaggcaccaggtgctagggtgccagggcctcccgagaaggaacaggtgcaaagcaggcaattagcccagaaggtatccgtggggcaggcagcctagatctgatgggggaagccaccaggattacatcatctgctgtaacaactgctctgaaaagaagatatttttcaacctgaacttgcagtagctagtggagaggcaggaaaaaggaaatgaaaccagagacagagggaagctgagcgaaaatagaccttcccgagagaggaggaagcccggagagagacgcacggtcccctccccgcccctaggccgccgccccctctctgccctcggcggcgagcagcgcgccgcgacccgggccgaaggtgcgaggggctccgggcggccgggcgggcgcacaccatccccgcgggcggcgcggagccggcgacagcgcgcgagagggaccgggcggtggcggcggcgggaccgggatggaagggagcgcggtgactgtccttgagcgcggaggggcgagctcgccggcggagcgccggagcaagcggaggcgcaggagcggcggcgtacggcggcggcggcggcggcgcccgagcacccgagggggtccgagccccggcagccggccagccccgcgccacaaagggagcgcccccgccgcccggcaccccgcctccctccccaatgtcctcggccatcgaaaggaagagcctggacccttcagaggaaccagtggatgaggtgctgcagatccccccatccctgctgacatgcggcggctgccagcagaacattggggaccgctacttcctgaaggccatcgaccagtactggcacgaggactgcctgagctgcgacctctgtggctgccggctgggtgaggtggggcggcgcctctactacaaactgggccggaagctctgccggagagactatctcaggctttttgggcaagacggtctctgcgcatcctgtgacaagcggattcgtgcctatgagatgacaatgcgggtgaaagacaaagtgtatcacctggaatgtttcaaatgcgccgcctgtcagaagcatttctgtgtaggtgacagatacctcctcatcaactctgacatagtgtgcgaacaggacatctacgagtggactaagatcaatgggatgatataggcccgtgtccccgggcatctttggggaggtgttcactgaagacgccgtctccatggcatcttcgtcttcactcttaggcactttgggggtttgagggtggggtaagggatttcttaggggatggtagacctttattgggtatcaagacatagcatccaagtggcataattcaggggctgacacttcaaggtgacagaaggaccagcccttgagggagaacttatggccacagcccatccatagtaactgacatgattagcagaagaaaggaacatttaggggcaagcaggcgctgtgctatcatgatggaatttcatatctacagatagagagttgttgtgtacagacttgttgtgactttgacgcttgcgaactagagatgtgcaattgatttcttttcttcctggctttttaactcccctgtttcaatcactgtcctccacacaagggaaggacagaaaggagagtggccgttctttttttcttggcccccttcccaaggccttaagctttggacccaaggaaaactgcatggagacgcatttcggttgagaatggaaaccacaacttttaaccaaacaattatttaaagcaatgctgatgaatcactgtttttagacaccttcattttgaggggaggagttccacagattgtttctatacaaatataaatcttaaaaagttgttcaactattttattatcctagattatatcaaagtatttgtcgtgtgtagaaaaaaaaaacagctctgcaggcttaataaaaatgacagactgaaa

SEQ ID NO: 25 - DNA, 1202 bp, Homo sapiens
gcatcaactcaattgtggccattgcatcatacactggatataatcaggaagactctgttatcatgaatcgttcagctgtagaccgcggcttcttcaggtctgttttctatcgctcatacaaagaacaggagtctaaaaaaggatttgatcaagaagaagtttttgagaagcctacacgtgaaacatgccagggcatgaggcatgccatttacgacaagctggatgatgatggtttgatagctccaggggttcgtgtatcaggagatgatgttattataggcaaaacagtcaccttgcctgaaaatgaagatgaattggagagcaccaatagacgctataccaagagagactgtagcacttttctcagaactagtgagacgggcattgtggatcaggttatggtaactctcaatcaggaaggatataaattttgtaaaataagggtacgctctgttaggattccacagattggagacaaatttgctagtcgacatggtcaaaagggtacttgtggtattcagtatagacaagaggatatgcctttcacctgtgaaggtatcacccctgatatcatcatcaatccccatgccatcccctctcgtatgactattggtcacttaattgaatgccttcaagggaaggtatcggctaacaagggtgaaattggtgatgccactccatttaatgatgctgttaacgtgcagaagatttctaatcttttatctgattatggctatcatctcagaggaaatgaggtcctgtacaatgggttcactggtcgaaaaatcacatcacaaatatttattggccccacttattaccagcgtttgaagcatatggtggatgataagattcactctcgtgctaggggacctattcagatcctcaatagacagcccatggagggtagatctcgtgatggtggcctgcgttttggagaaatggaacgagattgtcagattgcccatggagcagcccagtttttaagggaaagattgtttgaggcatcagatccatatcaggttcatgtttgcaatctttgtggaataatggcgattgccaacaccaggacccatacatatgaatgcaggggctgccgcaataaaacccagatttctttggtgcgaatgccttacgcatgcaaactattgtttcaggaacttatgtctatgagtattgcaccgcgaatgatgagtgtttag

SEQ ID NO: 26 - DNA, 539 bp, Homo sapiens
cttttcgatccgccatctgcagtggagccgccaccaaaatgcagattttcgtgaaaacccttatggggaagaccatcaccctcgaggttgaactctcggatacaatagataatgtaaaggccaagatccaggataaggaaggaattcctcctgatcagcagagactgatctttgctggcaagcagttggaagatggacgtactttgtctgactacaatattcaaaaggagtctactcttcatcttgtgttgagacttcgtggtggtgctaagaaaaggaagaagaagtcttacaccactcccaggaagaataagcacaagagaaagaaggttaagctggctctcctgaaatattataaggtggatgagaatggcaaaattagttgccttcatcgagagtgcccttctgatgaatgtggtgctggggtgtttatggcaagccactttgacagacattattgtggcaaatgttgtctgacttactgtttcaacaaaccagaagacaagtaactgtatgacttaataaaagacatgaactaa

SEQ ID NO: 27 - DNA, 5487 bp, Homo sapiens
tcctgtggcttgccccagagctgatccttgtctttgtccacttctcagcgaggatggcacttcagggagcccttcccttactatcgcagagagagcaggccctccccagtcatgtccaacccagaactctgttttgttttcttcatagccctagcatcacagaaaatcaccctgtgcattcatggatgtccacgggggcaagggctttgtgttgcttaacccagcatcctgaaccgtgtttgttgaatgaatacagaaccccgtttgctctgggagagcacagaaaacagtcttctatcatatatcatagccagctgcaaacagcagatggcttcccatatcccagagagtaagaaccagagagagagagaaagagagagagtttgggtctttctcctctgtgcctgctctctccagagaaactggaggggtagcagttagcattcccccgctggttccaccaagcacagtcaaggtctctaggacatggccacccctcacctgtggaagcggtcctgctggggtgggtgggtgttagttggttctggtttgggtcagagacacccagtggcccaggtgggcgtggggccagggcgcagacgagaaggggcacgagggctccgctccgaggacccagcggcaagcaccggtcccgggcgcgccccagcccacccactcgcgtgcccacggcggcattattccctataaggatctgaacgatccgggggcggccccgccccgttaccccttgcccccggccccgccccctttttggagggccgatgaggtaatgcggctctgccattggtctgagggggcgggccccaacagcccgaggcggggtccccgggggcccagcgctatatcactcggccgcccaggcagcggcgcagagcgggcagcaggcaggcggcgggcgctcagacggcttctcctcctcctcttgctcctccagctcctgctccttcgccgggaggccgcccgccgagtcctgcgccagcgccgaggcagcctcgctgcgccccatcccgtcccgccgggcactcggagggcagcgcgccggaggccaaggttgccccgcacggcccggcgggcgagcgagctcgggctgcagcagccccgccggcggcgcgcacggcaactttggagaggcgagcagcagccccggcagcggcggcagcagcggcaatgaccccttggctcgggctcatcgtgctcctgggcagctggagcctgggggactggggcgccgaggcgtgcacatgctcgcccagccacccccaggacgccttctgcaactccgacatcgtgatccgggccaaggtggtggggaagaagctggtaaaggaggggcccttcggcacgctggtctacaccatcaagcagatgaagatgtaccgaggcttcaccaagatgccccatgtgcagtacatccacacggaagcttccgagagtctctgtggccttaagctggaggtcaacaagtaccagtacctgctgacaggtcgcgtctatgatggcaagatgtacacggggctgtgcaacttcgtggagaggtgggaccagctcaccctctcccagcgcaaggggctgaactatcggtatcacctgggttgtaactgcaagatcaagtcctgctactacctgccttgctttgtgacttccaagaacgagtgtctctggaccgacatgctctccaatttcggttaccctggctaccagtccaaacactacgcctgcatccggcagaagggcggctactgcagctggtaccgaggatgggcccccccggataaaagcatcatcaatgccacagacccctgagcgccagaccctgccccacctcacttccctcccttcccgctgagcttcccttggacactaactcttcccagatgatgacaatgaaattagtgcctgttttcttgcaaatttagcacttggaacatttaaagaaaggtctatgctgtcatatggggtttattgggaactatcctcctggccccaccctgccccttctttttggttttgacatcattcatttccacctgggaatttctggtgccatgccagaaagaatgaggaacctgtattcctcttcttcgtgataatataatctctatttttttaggaaaacaaaaatgaaaaactactccatttgaggattgtaattcccacccctcttgcttcttccccacctcaccatctcccagaccctcttccctttgcccttctcctccaatacataaaggacacagacaaggaacttgctgaaaggccaaccatttcaggatcagtcaaaggcagcaagcagatagactcaaggtgtgtgaaagatgttatacaccaggagctgccactgcatgtcccaaccagactgtgtctgtctgtgtctgcatgtaagagtgagggagggaaggaaggaactacaagagagtcggagatgatgcagcacacacacaattccccagcccagtgatgcttgtgttgaccagatgttcctgagtctggagcaagcacccaggccagaataacagagctttcttagttggtgaagacttaaacatctgcctgaggtcaggaggcaatttgcctgccttgtacaaaagctcaggtgaaagactgagatgaatgtctttcctctccctgcctcccaccagacttcctcctggaaaacgctttggtagatttggccaggagctttcttttatgtaaattggataaatacacacaccatacactatccacagatatagccaagtagatttgggtagaggatactatttccagaatagtgtttagctcacctagggggatatgtttgtatacacatttgcatatacccacatggggacataagctaatttttttacaggacacagaattctgttcaatgctgttaaatatgccaatagtttaatctcttctattttgttgtcgttgcttgtttgaagaaaatcatgacattccaagttgacatttttttttcattttaattaaaatttgaaattctgaacaccgtcagcaccctctcttccctatcatgggtcatctgacccctgtccgtctccttgtccctgcttcatgtttgggggcctttctttaactgccttcctggcttagctcagatggcagatgagagtgtagtcaagggcctgggcacaggagggagagctgcagagtgtcctgcctgccttggctggagggacacctctcctgggtgtggagacagcttggttccctttccctagctccctggtgggtgaatgccacctcctgagatcctcacctcttggaattaaaattgttggtcactggggaaagcctgagtttgcaaccagttgtagggtttctgttgtgtttttttttttttttttgaaataaaactataatataaattctcctattaaataaaattattttaagttttagtgtcaaaagtgagatgctgagagtaggtgataatgtatattttacagagtgggggttggcaggatggtgacattgaacatgattgctctctgtctcttttttcagcttatgggtatttatcttctattagtatttgtatcttcagttcattccactttaggaaacagagctgccaattgaaacagaagaagaaaaaaaaaaaaagcagcagacaacacactgtagagtcttgcacacacacaagtgcccaggcaaggtgcttggcagaaccgcagagtgggaagagagtaccggcatcgggtttccttgggatcaatttcattaccgtgtacctttcccattgtggtcatgccatttggcagggggagaatgggaggcttggccttctttgtgaggcagtgtgagcagaagctgatgccagcatgtcactggttttgaagggatgagcccagacttgatgttttgggattgtccttattttaacctcaaggtctcgcatggtggggcccctgaccaacctacacaagttccctcccacaagtggacatcagtgtcttctctgtgaggcatctggccattcgcactccctggtgtggtcagcctctctcacacaaggaggaacttgggtgaaggctgagtgtgaggcacctgaagtttccctgcggagtcgataaattagcagaaccacatccccatctgttaggccttggtgaggaggccctgggcaaagaagggtctttcgcaaagcgatgtcagagggcggttttgagctttctataagctatagctttgtttatttcacccgttcacttactgtataatttaaaatcatttatgtagctgagacacttctgtatttcaatcatatcatgaacattttattttgctaaatcttgtgtcatgtgtaggctgtaatatgtgtacattgtgtttaagagaaaaatgaaacccacatgccgccattttcctgaatcaaattctgcagtggaatggagaggaaaatacttctaggcaagcagctagactggtgaattgggggaaatagaaggaactagtaactgagactcctccagcctcctccctattggaatcccaatggctcctggagtaggaaaaaagtttaaactacattcatgttcttgttctgtgtcactcggccctgggtagtctaccatttacttcaccccaagtcctgctgcccatccagttgggaagccatgattttcctaagaatccagggccatgggagatacaattccaagttctcgcttcctcctttgggcatctcttctgcctcccaatcaaggaagctccatgctcaggctctcagctctcgggccagtgctctgctctgtccagggtaggtaatactgggagactcctgtcttttaccctcccctcgttccagacctgcctcatggtggcaacatggttcttgaacaattaaagaaacaaatgactttttggaatagccctgtctagggcaaactgtggcccccaggagacactacccttccatgccccagacctctgtcttgcatgtgacaattgacaatctggactaccccaagatggcacccaagtgtttggcttctggctacctaaggttaacatgtcactagagtatttttatgagagacaaacattataaaaatctgatggcaaaagcaaaacaaaatggaaagtaggggaggtggatgtgacaacaacttccaaattggctctttggaggcgagaggaaggggagaacttggagaatagtttttgctttgggggtagaggcttcttagattctcccagcatccgcctttccctttagccagtctgctgtcctgaaacccagaagtgatggagagaaaccaacaagagatctcgaaccctgtctagaaggaatgtatttgttgctaaatttcgtagcactgtttacagttttcctccatgttatttatgaattttatattccgtgaatgtatattgtcttgtaatgttgcataatgttcactttttatagtgtgtcctttattctaaacagtaaagtggttttatttctatcac

SEQ ID NO: 28 - DNA, 3786 bp, Homo sapiens
gccaaccaactcaaacttgaagacatgaaatccccaaggagaaccactttgtgcctcatgtttattgtgatttattcttccaaagctgcactgaactggaattacgagtctactattcatcctttgagtcttcatgaacatgaaccagctggtgaagaggcactgaggcaaaaacgagccgttgccacaaaaagtcctacggctgaagaatacactgttaatattgagatcagttttgaaaatgcatccttcctggatcctatcaaagcctacttgaacagcctcagttttccaattcatgggaataacactgaccaaattactgacattttgagcataaatgtgacaacagatgttaccctgaacatgagagtcagactaaatgtaggctttcaagaagacctcatgaacacttcctccgccctctataggtcctacaagaccgacttggaaacagcgttccggaagggttacggaattttaccaggcttcaagggcgtgactgtgacagggttcaagtctggaagtgtggttgtgacatatgaagtcaagactacaccaccatcacttgagttaatacataaagccaatgaacaagttgtacagagcctcaatcagacctacaaaatggactacaactcctttcaagcagttactatcaatgaaagcaatttctttgtcacaccagaaatcatctttgaaggggacacagtcagtctggtgtgtgaaaaggaagttttgtcctccaatgtgtcttggcgctatgaagaacagcagttggaaatccagaacagcagcagattctcgatttacaccgcacttttcaacaacatgacttcggtgtccaagctcaccatccacaacatcactccaggtgatgcaggtgaatatgtttgcaaactgatattagacatttttgaatatgagtgcaagaagaaaatagatgttatgcccatccaaattttggcaaatgaagaaatgaaggtgatgtgcgacaacaatcctgtatctttgaactgctgcagtcagggtaatgttaattggagcaaagtagaatggaagcaggaaggaaaaataaatattccaggaacccctgagacagacatagattctagctgcagcagatacaccctcaaggctgatggaacccagtgcccaagcgggtcgtctggaacaacagtcatctacacttgtgagttcatcagtgcctatggagccagaggcagtgcaaacataaaagtgacattcatctctgtggccaatctaacaataaccccggacccaatttctgtttctgagggacaaaacttttctataaaatgcatcagtgatgtgagtaactatgatgaggtttattggaacacttctgctggaattaaaatataccaaagattttataccacgaggaggtatcttgatggagcagaatcagtactgacagtcaagacctcgaccagggagtggaatggaacctatcactgcatatttagatataagaattcatacagtattgcaaccaaagacgtcattgttcacccgctgcctctaaagctgaacatcatggttgatcctttggaagctactgtttcatgcagtggttcccatcacatcaagtgctgcatagaggaggatggagactacaaagttactttccatatgggttcctcatcccttcctgctgcaaaagaagttaacaaaaaacaagtgtgctacaaacacaatttcaatgcaagctcagtttcctggtgttcaaaaactgttgatgtgtgttgtcactttaccaatgctgctaataattcagtttggagcccatctatgaagctgaatctggttcctggggaaaacatcacatgccaggatcccgtaataggtgtcggagagccggggaaagtcatccagaagctatgccggttctcaaacgttcccagcagccctgagagtcccattggcgggaccatcacttacaaatgtgtaggctcccagtgggaggagaagagaaatgactgcatctctgccccaataaacagtctgctccagatggctaaggctttgatcaagagcccctctcaggatgagatgctccctacatacctgaaggatctttctattagcatagacaaagcggaacatgaaatcagctcttctcctgggagtctgggagccattattaacatccttgatctgctctcaacagttccaacccaagtaaattcagaaatgatgacgcacgtgctctctacggttaatgtcatccttggcaagcccgtcttgaacacctggaaggttttacaacagcaatggaccaatcagagttcacagctactacattcagtggaaagattttcccaagcattacagtcaggagatagccctcctttgtccttctcccaaactaatgtgcagatgagcagcatggtaatcaagtccagccacccagaaacctatcaacagaggtttgttttcccatactttgacctctggggcaatgtggtcattgacaagagctatctagaaaacttgcagtcggattcgtctattgtcaccatggctttcccaactctccaagccatccttgctcaggatatccaggaaaataactttgcagagagcttagtgatgacaaccactgtcagccacaatacgactatgccattcaggatttcaatgacttttaagaacaatagcccttcaggcggcgaaacgaagtgtgtcttctggaacttcaggcttgccaacaacacaggggggtgggacagcagtgggtgctatgttgaagaaggtgatggggacaatgtcacctgtatctgtgaccacctaacatcattctccatcctcatgtcccctgactccccagatcctagttctctcctgggaatactcctggatattatttcttatgttggggtgggcttttccatcttgagcttggcagcctgtctagttgtggaagctgtggtgtggaaatcggtgaccaagaatcggacttcttatatgcgccacacctgcatagtgaatatcgctgcctcccttctggtcgccaacacctggttcattgtggtcgctgccatccaggacaatcgctacatactctgcaagacagcctgtgtggctgccaccttcttcatccacttcttctacctcagcgtcttcttctggatgctgacactgggcctcatgctgttctatcgcctggttttcattctgcatgaaacaagcaggtccactcagaaagccattgccttctgtcttggctatggctgcccacttgccatctcggtcatcacgctgggagccacccagccccgggaagtctatacgaggaagaatgtctgttggctcaactgggaggacaccaaggccctgctggctttcgccatcccagcactgatcattgtggtggtgaacataaccatcactattgtggtcatcaccaagatcctgaggccttccattggagacaagccatgcaagcaggagaagagcagcctgtttcagatcagcaagagcattggggtcctcacaccactcttgggcctcacttggggttttggtctcaccactgtgttcccagggaccaaccttgtgttccatatcatatttgccatcctcaatgtcttccagtcaacatccctgggttcatccacacctgtgttttctatgagttctccaatatcaaggagatttaacaatttgtttggtaaaacaggaacgtataatgtttccaccccagaagcaaccagctcatccctggaaaactcatccagtgcttcttcgttgctcaactaa

SEQ ID NO: 29 - DNA, 2782 bp, Homo sapiens
gacactgatgacattgaaagtcctaaacgcagtatccgagacagtggctacatcgactgctgggattccgagcgcagcgactccctctctcctcctcgccacggcagagatgattccttcgacagcctggattcctttggctctcgctctcggcagacgccttcaccagatgtagtcctcaggggaagcagcgatgggagaggaagcgactctgaatccgacttgcctcatcggaagctgccagatgtgaagaaggatgacatgtctgcacggcggacttcccatggtgagccgaaatcagcagtgccttttaaccagtacctcccgaacaaaagcaatcagacggcctacgtccccgcgcctctgagaaagaagaaagcagagagagaggaataccgcaagagctggagtaccgccacctccccgctgggtggggagaggcccttcaggagcaccagcatgtttgacatgcggtgtgaggaggaggccgcggtgcagccgcacagcagggcccgccaggagcagctgcagctgataaataaccagctgagggaagaggacgacaaatggcaagatgtgagttctggccaaggcgcgcgggcagcggggaggcttctggcagcagaaaatccagccgggtgggtagacgtggacttgaaagccatgcggggaaagggagcccctagagggattcaaaaggacctggctcgttggaagagtcgtagaagaagtgtttctcaggacttaatcaagaaagaggaagaaaggaaaaaaatggagaagttactggctggagaagatgggacaagtgaacgaaggaaaagcatcaaaacctacagagaaattgttcaagaaaaagagcggagagagagagagctgcatgaagcatataagaacgctcggtcccaggaggaggcagaggggatccttcaacagtacattgagaggttcaccatcagtgaggctgttctcgaacgcttggagatgccaaaaattctggaaagaagccattcaacagagccaaatttatcctccttcctgaatgaccccaatcccatgaaatacctgcggcaacagtcactgcctccacccaaattcactgccactgttgaaaccaccattgctcgtgccagtgttctggataccagcatgtcagcaggcagtgggtctccaagcaaaactgtcactcccaaagcagtgcctatgctgacacccaagccttactcccagcccaaaaattctcaagatgttctgaagacctttaaggtagacgggaaagtcagtgtgaatggagagacggttcatagagaggaggagaaggaaagagagtgtcccacggtggcacctgcccactccttaaccaaatcccagatgtttgaaggtgtggccagagtgcacgggtctccactggagctgaaacaagacaacggtagcatcgagatcaacataaagaagccaaactctgttccccaagagctcgcagcaaccactgagaaaacggaaccgaatagtcaagaggacaagaatgatggtggaaaatcaagaaaagggaatatagaacttgcctcatcagaaccacagcattttacaacaactgtgactcgatgcagcccgaccgtggcctttgtggaatttccctccagcccccagctgaagaatgatgtgtcggaagaaaaagaccagaagaaaccagaaaatgaaatgagtggaaaggtggagttggtgctgtcacaaaaggtggtaaagccaaaatctccagaacccgaagcaacgctgacatttccatttctggacaaaatgcctgaagccaaccaactacatttgccaaatctcaattctcaagaagaggagcgcaggcgacaggaaaaatggcaacaggaacaggaacgtttgctccaggagagataccagaaggagcaggacaagctgaaagaagagtgggaaaaggcccaaaaggaggtggaagaggaagaacgcagatactatgaggaggagcgtaagataattgaagacactgtggttccatttactgtttcttcaagttccgctgaccagctgtctacctcttcctccatgactgaaggcagtgggacaatgaataagatagacctgggaaactgtcaagatgaaaaacaagacagaagatggaagaaatcattccagggagatgacagtgacttattgctgaagactagggaaagtgatcgactggaggagaagggcagcctaactgaaggggccttggctcattctgggaaccctgtatcaaaaggagtccatgaagaccatcagctggataccgaggctggggccccacactgtggaacaaacccacagcttgctcaggatccatcccagaatcagcagacatcaaatccaacgcacagttcagaagatgtgaagccaaaaaccctcccgctggataaaagcattaaccatcagatcgagtctcccagtgaaaggcggaagtctataagtggaaagaagctgtgctcttcctgtgggcttcctttgggtaaaggagctgcaatgatcatcgagaccctcaatctctattttcacatccagtgtttcagggtacgtacttactgctttgctctccagacacaacttcatgatgtcttttggcatcgttccgtgctgaaaaatgcctcttggaaattctggagggctttgtcttgtggaatttgtaaaggccagcttggagatgcagtgagtgggacggatgttaggattcgaaatggtctcctgaactgtaatgattgctacatgcgatccagaa

SEQ ID NO: 30 - DNA, 718 bp, Homo sapiens
atggaactgcttcaagtgaccattctttttcttctgcccagtatttgcagcagtaacagcacaggtgttttagaggcagctaataattcacttgttgttactacaacaaaaccatctataacaacaccaaacacagaatcattacagaaaaatgttgtcacaccaacaactggaacaactcctaaaggaacaatcaccaatgaattacttaaaatgtctctgatgtcaacagctacttttttaacaagtaaagatgaaggattgaaagccacaaccactgatgtcaggaagaatgactccatcatttcaaacgtaacagtaacaagtgttacacttccaaatgctgtttcaacattacaaagttccaaacccaagagtagtgttctacaaccagatgcatcaccttctaaaactggtacattaacctcaataccagttacaattccagaaaacacctcacagtctcaaggtattattttgccggtggttattgctttgattgtaataacactttcagtatttgttctggtgggtttgtaccgaatgtgctggaaggcagatccgggcacaccagaaaatggaaatgatcaacctcagtctgataaagagagcgtgaagcttcttaccgttaagacaatttctcatgagtctggagcgttcctaggaaaaggaattttaggaggagaatttgtgagcagtgaatctgacagcccaggag

SEQ ID NO: 31 - DNA, 669 bp, Homo sapiens
atcactggggtgatcctgctggctgttggagtctggggcaaacttactctgggcacctatatctcccttattgccgagaactccacaaatgctccctatgtgctcatcggaactggcaccactattgttgtctttggcctgtttggatgctttgctacatgtcgtggtagcccatggatgctgaaactgtatgccatgtttctgtccctggtgttcctggctgagctcgtagctggcatttcagggtttgtgtttcgtcatgagatcaaggacaccttcctgaggacttacacggacgctatgcagacttacaatggcaatgatgagaggagccgggcagtggaccatgtgcagcgcagcctgagctgctgtggtgtgcagaactacaccaactggagcaccagcccctacttcctggagcatggcatcccccccagctgctgcatgaacgaaactgattgtaatccccaggatctacacaatctgactgtggccgccaccaaagttaaccagaagggttgttatgatctggtaactagtttcatggagactaacatgggaatcatcgctggagtggcgtttggaatcgcattctcccagttaattggcatgctgctggcctgctgtctgtcccggttcatcacggccaatcagtatgagatggtgtaa

SEQ ID NO: 32 - DNA, 37426 bp, Homo sapiens
tccttctgtatgaaaatctctgtggcatgatacagcttgttactcaagttaaacactttccttcctgtgtatctgaaattacgtgttactttacaagaaccttgaagagggttctgccttaatatttgtcctgggacgttgagatggtattattataattagcaagattcaaaggatttcaggtaattagagcatatagtgttttaaaaaataagaagcggccgggagcggtggctcacgcctgtaatcccagcactttgggaggccgaggctggccaatcacgaggtcaggagatagagaccatcctggctaacatggtgaaaccacgtctctactaaaaatacaaaaaaaattagccgggctcggtggcgggcgcctgtagtcccagctgctcgggaggctgaggcaggagaatggcgtgaacccgggaggcggagcttgcagtgagccaagatcgcgccactgcactccagcctgggcaacacagcgagactccgcctcaaaaatacaaataaaaataaaaaaaataagaagaaaggatttagtagaatttaaagagaggcagaacttcctaatatctttccagtaacctacttgtccaaataaaaatacctgctaaacatcatttggggaaataacctgaatagttaattagtatcttgaattgacaaagtaggcagaataatattaatatttatcctttgaagtgcgactaatggagtctcggtctattcatattggaggttcatatcaaagtttaattttcttggttagtttaaaatatctcattaatattttaactaattctaaaaaactgccacacttgaatatttttaggtattatttttagataacaaaagccatggccactcattaaaataaagttctaaaattaagtaaagtcagatagttttttttttttttttttttgagacagggtcttgctctgttgcccaggctgaaatacagtgatgtgatcttgactcactgcaacctccacctcccaggttcaagcgattctcctgcctcagcctcccgagtagctgggactacaggcgtgtgccaccatccccggctagttttttgtgtttttagtaaagatggggtttcaccatgttggccaggccagtctcgaactcctgacctcgtgatccgcccaccttggcctcccaaagtgctgggattacagacatgagccaccgcacctggcccagatagttcttttctttaaaatttctttttgtaaatacctaccagccaaaacaatcacggccaacatgagtgtatgtccttctgcgttatttttctgtatagatttggtgtgcatttaatattcttgtaataatattctgctggttgttaaaactttattcagcagtgaagcagtgagggagaggaggagataagacatgaccctaaagtctctgccagctccatcagcacctcgggcaggttctgtctgcaatccgttcttttcttagatgatttttgatgagtgagggggttgttgagcccccagctgctgtttcctcagaggcctgcttgctcttgggtaaaacatggggacaaaggctgacagtgctttgaagtaggtgcctattcccttagggctggagtatttgaaaacatctacacaggactcgcttacgtgctgcttacatatttttcctgccattgagtcaatgtgacacttcattgccacagtagtcgggcaggagagctgcaaacagaaacacaaacgggagagctgagaggcagccaggcaatgtcctcaactgaccacagtctcattattaaagaagatagaaaggttatttaagccagaggaatcaaatagtcccagtggatgagggatggaatagtgactagtgagctccttttgtagtttacttcttttggggacagcatccactgaaggcttgcatagctctgagaaacctgcaacgtgaagattaggccaaggcaaaatggccgactcttaacaaagttgacttgcaacccgtgtaattggaatttgatggggggaaagcgtggcgcaacaaatcaaagcataagtctctaacctcttgtccttatgatcttcaaataggattccagatctaaaagcctcttatatgaccatgaatttagatcttgcctagaaaacagcaagagtgcatgagggagcagcacatcccatcagtcatctgctagcaagaattgtctcctaagaaaattgatttacacagcaggatgtcaaatggatgacaaaggtaacataggcaagcaatttaaaggaatcatatcatttttccactgtacatttgaatatcacttttcttccactgtacatttgaatatcacttttctaagtatttttgcctcgttatctctttttatactttgcatatatataccatttttggcttgccatttttcaagaaaacattttcacagctagatgagatttttaaaatatatatttgaagctggttaaaaacaactacaatctgagaaagacctcttattgactaaagtggagcttaaaaagggagaggaggatttggtttttctccaaatgcctagaaatgtaagtgatgcttatttttaatctatcacaatcctgtatctaagaccttccttggacatctatgataaatcaaaatatctttatcatgacaagaacagtgatatacacccgggtggaatcttgatttcatgagtatgtatttgacataatttattacgaaaaagtgaattaaaactttgtgttacaagtctttccatctaaattagaccccaagatcaagagatttggtgtttgtcttccttacatctgccattggtagccccaactttccagagaaaaagcaacaactgttagaaatgttatagatataccaagggtatgctaaatcaaccagtgatgtatgttgtgaaagtgacaagcttttgatcaagatagaaaacaagataaaaactatgagtgttttaggatgaggcatcttctcattaaagttcagttacattgtctctgcccagcttttttactgctactgacattggcatagtttatagcacttggtatgcaaacctcaccctccttcagttattcaatgttgtgtccttgctgtgttctctgaaattctgattatttaaaaatgatttgaaaatgaaggtctcctatcttcctggcaatctctcaatggctattcatatctagcaccctctatcaaatgttttcctctgtttctccactcctcccctcttctctcacctggttcagaattcatggacaagattgcatgggaagccataggcattccagggtaaggagaagcagactggttcctccctacctacactgatgtccagacctcagtactatgcttccctctaaaacagacatttctgttctcagagctcaggaacacagcaaagattaggtacaggctgtggatatttctcaggttgccaaaagcaagagattctgctctttcttgggttcagatttgctggagaacaggagtccaagcatgtgctcctcagtggttggtgtaaagtcggtgcccactaggagttgaggcagataggtaccttgaagcccagagaacaaaccaaatctctcattgacctacctagtttttgtgtagttgcccttggtaattccttagtcttagctcttgacagagtaaggtgggaaagacctcaggtatctcacttgggtctgagttttaaagaaagtagaaactaccctccccacccaccccacaaggccagtgcagaggcaatagtattaaatagtaattccaagagagtaattctagagaaaggtgaaatgtccagctgcccaaactacatggaatgtttacctcttatctcccaccttggaagatctggtttttaatttcattcaggaagacagaaatttttgtgtactctcacacgtttcacatctcaatgcattttctatatcgtggacaagttcaaatgcatatctattaatgttaaccttggaaaaacctgttaactcatcaactgaggttcaggcttgagttggagcctcaggcaggttggttgtctattctctattctgtggcttccaactgcatccctagcatcagtgagtccccaacctcattcaaaactagaatgatggtgaactctgctgtgtgtggatcagcacctatgtatcactacccttgataagtaactcaaaaacacatgcctattgatcatttccataagtaaaagataggcatcaaaaacattgttgttaaacaaaatgtaccaagttggaaattttctcccagctctgagcatctctcaatgaagtgacgtatgctgaacaagtaagtatatcacaaaatgtgacctttcggggcatcttagtagtgagaaagaagacaaacgtaagaaaggttagtagtccagagaagaaaagaagagaactgagaaacagtaacagttggaattatttttgtgtggttgttgttctttctggttataactttcctaatagtcataataccaggtgtagatttggaactctgcatccaagtctctcttgctctcttaatatatttctggaaattaacatgcagtatttgattataacatggtcaatatttagagcccatcatatgcaaaatataacagtgaaacatcaatactaaatagaaatgtctgataaaattataggtacttcattttttgccttatacttttctgtcttttccaagtattctgcaatgaacagtaactctcataactagaatttttttaactgcctgctaattaaaacaatgccgtttcagatctcccagagtttttaacatgagtgctgcctattcctgcttcattccttctttttctcttcaaacagccagtttcagaaatgagatgttctggtttgatggtaggccaggatcaaattaaactactcctgaatttcacaagcctaatatttcaaatgagagatttcagctcatttgacatattctaacatacttgtgcttgatgaagcgttacttatgtgaaccattagcttgaataatgtgtgaaagcaaaatgacggttttcttaggcagtcactaattgttcttccctcagtgcttctacaaatgaacgttgagaggcagagagaagggtgtggcaggtgatgaaggctgtccttctctggagacccagcatagggtttctgcagcagtgcacgcagtgttgagaatgcaatgcacagagataggtacccagccatccagatcagacccagtgctcaattagaaggaagattttgcagccaaatgatcatcacatccacacaaataccatctagtgctcagtcttgagccctagtatgtgagacagagaaaatctgtggtgcttgggtgtgtctgaacagctagaactccactgggttagccaactctaccgcctagttatggtttctatttttaaattctatattcatacagctgacctttttttttccactatgctggttaattttaatgctatctttaaaagatgagagctaattgagagaaaaagagagcagagacagataacttgggcatctctctggcttcaatcactgctcaatctaatatagttcccaccctgggtgttcagagtctcttatttggagttagacccagctggggcttgaaactggctccagacattcagcagcattagcagatggtggaatcctcgaggaagtaattctactgcgggttttctattccctaaccaggtcttttgagcataatgtgctttctcaccagctcactcagcctcctcattctgtaactaaccagtctctccttagctctactcaaggaataaattacaaaacagagatggagagaaaagacagagagagaaagcgaggagagagaggggtcatggtccagtatattccatacatgctagtgggaagccagtatttttttttttttttttttttgcttcccagtcataaggatttcttactgcccgcccctcccacccccaagtgccattttcctatttttagctttgtttttgttttaagaaatccttctcttcagtcttatctggggattcttaatttcaaaacaattgaaatcttcaccaaccatcctatagcagaagcactatctgggtttggattagaaatatccctgtcacgagcacagtggctcacacctgtaatcccaactctttgggaggcagaggcaggagggtcgcttgagcccgggagtttgagaccaacctgagcaacatagcgagacacccatctctacaaaaaaatacaaaaattaactgggtgtcgtggcacctgcttgtggtcccagctacgctggaggctgatgcgggaagactgcttgagcccaggagttcaaggccgcagtgagctattttcacatcactgcctgccctctagtctggcaacagagcaagactctgtctctgaaaaaaaattaaaaaaaaaaaaattcttgtaaatcttctacttccaactattgtgcaaatgacaattgttaaaaataggtcggggcggtggctcacacttgtaatcccagcactttgggaggccaaggcgggcagatcacttgaggtcaggagttcgagaccagcctgaccaacatagcaaaaccctgtctctactaaaaaagcaaaaaattagccgggtgtgggggcgcgtgcctataatcccagctactcgggaggctaaggtaggagaattgcttgaaccagggagtcggaggctacagtgagccaagatcatgccattgcactccagcctgggcaacaagaacaaaactctgtctaaacaacaacaacaacaacaacaaaactatgaaaaatgtggggttttgtttgttttttgttttgtttgagaaagggtctcactcccttcggccaagctggagtgcagtggtgagatcatgattgactgaagcctggactttctggactcaagccatcctcccacctcagcacgctgagtatctgggactacagacacatgccatcatgcctggctaattttttatatttttagtagagatggggttttgccattttgctcaggctgatctcaaactcctgggctcaagggatctgcctgcctcggcctcccagggctctgggatgacaggcatgagccaccacgcctggccaaaaagttttaaataaaataaacatgtcagattttacctatgcttctacaaactattttacaagcttagattttttaaaaaaacaatgaaatcatacttgcaaaagaaaaatccctgctaaaaccaaaaatataagttatttttaaagtagtccacaaagtgggtatttggtttgggtgtttgcttgttttatttttgtttattttttttttcttggccaaccaatattttcccgttctactcatttccacacctggtcccattgattctatgagtttccagttagccagctttagtttctattgttcataaacaaaaatactaaccaatataactggtctccctattgcccctcgcctcttcttcctcttctgaaacttctagcaattaagcataaagtagacaaggaatgaaccaaacgctatcttccagataaattccccagattattagtaaactggaattcagggaataggcactgcagttaatacaagaagggactgtttcagcccacaatagcatgaggtgtatttataagacagaaagatgtgagagtgcacctgttcctctgcaacagtgggggttaggacttggacagtttacagttttactcggtcagctttagcaaagaactgtgtgtgggaggatccctcctttttttttagccttgggctctgatatcgtacctggttgttcggaaataaaggccactaacagatccttgggactcgtgaaggggggtagggacaggaaaagtcatcattaagcagtgaaggcactgaacttatagctccccttacatacacggggacattcaaatgcttttgtgaacgttattatctttgctgcgcttcccaacaatgctgggtggagacagagcagatattgccatctccattttactgttgacaacaccaagcttcagacagatgaagtaagttttctctttttttttctttcgttgttttctttttgttgttgttgttgtttagagacagggtcttttgctctgtcgcctaggctggagtgcagtagggggatcacagcacactgcagcctcgaactcccaggctcaagtgatcctcccacctcagcctcccatgtagctgagactacaggcaggcgccaccacgcctggctaattttttgtattttgtgtagagatgggggtttcgctgtgttgcgaaaccgggctggtctcaaactgctgggctcaggcgatcctcctgcctcggcctccaaaagtgctgggattacaggtgtgagccatcgagctggcctgaagtaagtttgctaagtttccacggctgaaacccacatcatctggctcctataaagaaatcaaaaaggtaggctatgtaatatattggcaaagaggaacaagcggtaaatgagtgaagggttgtagacctttaatagctaatattgcagtaatgccacctgttaggtcaggagatgagcaccttaccttaagacgaggacaacatctggttgcctgtgagaagggacaggcagggtatcaggtgctgcacaaatgtttaatgaatgagtgagataagacaggaggtagaatgagcaacctgagagagggcctggtaccctgtaaggcgttttgattcagcagaacgagtaaggagaagcccttccggagtgtaacacaccagcactagaccaagacacctggctcactggtcagctgcaaaaactttcatactcagattttgtttttctcaatgatgaggtcttaataaggaacaacaattctgcctccaagcaacccactgtggctaatcctggtggaaaagagttttctttttctcttttttttttcttttttctttttcttttcttttttttttttttttttttttttttttgagacagggttttttgctcttcttgcccaagctacagtgcagtgacacaatctcagctcactgcaacctccgcctcctgggttcaagcgattctcctgcctcagcctcccaggtagctgggattacaggtgcccgccaccacgcctggctattttgtttttttttttgtatttttagtagagacgggggtttcaccatgtttgccaggctggtctcgaatctgacctcaggtgatccacccatctcggcctcccaaagtgctgggattacaggcgtgagccaccatgcccggacgagaacagttttctttaggctttgggttgctccttttcctttttgctttcacaaccgaaatgcgtgctcagagtgatccaagatatttgaagaacagtggcagcttggaggtgtttaatcaccgtaaattcgagacggcagaaaggcgtccccgcctggagccccgggcgatcgctcactctgagcagcgtcgcccagcgggcagaggcggctggtgtgttccggggtctccctcccttcccgcagcactcggcgcccgcaagctgccacctcccggggcggccagggaaactcagccggctctgggaggcgggggccgcggtcgaggggcgccgctattggctgatcgggcgggggaggaggggcagggaggccgtgattggcggggacccgagctgaagggggcggggccgctatatcagcagagtccctgtcgcagcgcaggcagttgggctgctggagtgcggcgccaccgcggaggacaggggcagctggcgggcagcgggtgagggggtggcggggacgcgagtggcggccgcggggccccggacaagggtccgcagagctgcagccttcgagggccagccctctccgagtccggggctgggtcccaccagtgacaaggcggcagccccgcgcacaccaaagagaaggcggctgtggcggcagcggcagccccagccatgctgtgttatgtgacgaggccggacgcggtgctgatggaggtggaggtggaggcgaaagccaacggcgaggactgcctcaaccaggtgagggcgaggggcaagaaggggccccggcgggtcccgcgagccgagggcctcgcagcgacgcctggcactctggcgcgccccctaataggggccgggtagcactgcggcggcagccggggggagcgcgtcccctcctctccacgggcgtggggcgcgcggtctcctcctggcgcgcgtggggtgcgcggagaaagcgcgcagcgggggtccccagcgctgagggccgggcgcagcccgcagccgggatccaccccccagcgccccatcatccccccaacccagcactttcccggaagaaggcggctccgcacacctgccgcaggtatgtgcgtgatgccgcctgtcgggtccccgcggcgcctggcagtgccacccgcgtgccaggatgggatggagtggctcgaagcagtctcgggccccaggggttcttggcagacaagccgggcccttgtctcacgctgcttctcaggctgctgctctcaaatgcaccgttcacctgcatctccgggtttgcgggggacgggaggaataggtttgggtcatctactgctcggttgtttttaagcatgtgtttccttaacagtgagggagatcggtgccaaatagtgcagaggtggtatggcagacagcacatgtgatcccaggaaaacgctgtgccctcaacccctctagctctgagatgtttggaaaaccgcttgtgaagcttagctgacacttgtggcgtgttccctcaatgtgtttgatttttggagtccaaatggttaaaattgcccagataataagtcgccaaaaatcagctgtgcagagtatgctggtggagggaattccggtgattggaatacgaaggaaaataccctgtagtttcccctcctcatcttttggaaggctacttttgaggactccttttttctctattgcaattggtcatgccctagacgttaaaaggaattatgagcctccatactagagctcgtggtttggtatcattggagccgtggaactttgtttttccagtttagatcaggaattgtaacaccattgaactttgtaaaaagcaccagcaatcttagcctcagggagccgttgggtttgctttgatacgtaccatttgctcatccaggctgcattcctttttgttttaggtgtgcaggcgactgggaatcatagaagttgactattttggactgcagtttacgggtagcaaaggtgaaagtttatggctaaacctgagaaaccggatctcccagcagatggatgggctagccccttacaggcttaaacttagagtcaagttcttcgtggagcctcatctcatcttacaggagcagactaggtaaagtgagctaaaataaaccaatgtcaaattgacctttggttccctttagaagggccgctgcaccttcccagagatactcacaggcaagtttgttttgatgcggagttccatcttaacttaggttttccatgcaggtccttttgttgaggtggagggggagctacctacttggtctgagtgcattttccaatccttcttttagtttttcttgtctttataaacttgatgggtgagcagggttgaattcttacaaacacttgagataagtgctaccccaggaaaaaaaaaaaaaaaaagaaaccaccctacccgactgactgacttcctgatagcagcatctaatgcccgatagtaacctctgcctcagcagtgttactataggtcattgcagactgttctaacagaaagcaggaaacagttcctcttgggttacttaaacttggtcagtttcttcagcctagtgtcagattacagtgtgcagccaagagctctgtttgacttcatgcagaatttttaaagtttttaagtttcttgaaaatgtaatttcatgaactcttctaaggctactgtaactgaattccaacccacagatatgttacacacgattggtgagtatagattgaatttatctctctacgttgtaaaacaccaccaacagtggtagacaactgaagcatgtggtctcatttttcaaacaaaatatgttctcccctggactgactctaatacttgattctcaagaatgagccaaactaggaaattgatatttaatatttattgaaaggcaggagacttcaatcttacagtggcatatcaaaaaattaaaaaggaaaacagctactttgaagacatagcaagctttggatctaagttctaatgtttttcataattctttggctgagaaatttgccatgcatatgaaaaatgtgattctaaaaattttaagtaatgatgaatgagcattatcctttaagagttttttacatgacatttgcttgtttgttttaccaaaggactgataaagactcattttgaaatacttatcatttgaatttgaaatttccactttgccttgtaatcgagctttaaaggttgaggcagacgtttaattttgtttctgaatgaagatggtatattgagttcttggtactcctgaaaatatcttgcaaaatattcaagtgattgcatgcttaaggatgttttagctgtctgtattaatcagaatagactttttaaaattattatttaaagccgatttgtgaaagctttgcgcttcactgtcataacttgcagtcgaatacaagatataacacaacatattggaattttcattgtgtagtcctattatgattttgtaattatttcaagatctctagatgcaacccagttttgatggcacaaaattattttttaaatcttcagaagcttggagtaccaaataactgcatttaaacaatggctgcagtgataatagcataatacatttgttttatgaatgtattcagactttataattgactagtagatggtctctacctgtgctttcctgtaattgggttagtaactattatcaaatcaattttattcatgtaagaaatagagacattttatgaattagaacttgaatcaaatttcctgtcttggtctctcctttattgattcaattgacttggactcttgagattcataatagtactcaaagaatgtacatacctagttcaactaggtaattttaattgattttaattctttttgaaattgtatggaaaagttaagtgtgaccttaacttttaacttgcttttaatatgttggtgaattttacttggtttcatggggttggctgaaatacataactgacacttaagttttaataactagataaagtgatttgtaattagcatttgtacctcttaattaggacatcagaagctgtactgggtccagtttacaattagcattgtttttacatgcatgaaactatagaacaaaaatatgtatgtttacaaatgctagcaaatgaagctggttcgtaaacttctttgatgtttaattatttgttgtaaaatacttatataaaatgccatgaatataaaataggtctgtttatgtagtgagtaaatttagctttgacaatccagttatgaaaggtgatttttttattcttttctaaatcatgagggtgcatgtagtgtagtatactgaaagtatctagacagtttattaaatgatgctgaaatatcctggcagagttgtcctctggggacaattaaggtagccaagttgggaagggcagttaacttattagttcatatcagattagggaggcccttgtgagaatgatgggcaggaaggcctgtttgtcataggacagcaccagggaaccaggcagaagccctgtattgtagtttcagctctgccaccaactaccagccatccagactgctatgggcccagctctacatcctacttgaaggcctctgaagagatggtttctaaatttctcttagcaataacttttttcattgcttttgtgtcctctttatattattttccttaatgttttcctaaatatgtgtctctgaaaacagaaaaagcacatcaagtgtttgcttagattggtaggtagagttctgatttggcctaattttagatttgattcttctatctagattatgctttgctcttgaatatgagcctcaaatgtaaaaggagagtcttttacttttcagctggcatatttcagagatggagacagcaggttattttcagcagatgtttgtgatgccatggaataaaatgaatagtgaaacaaattaatgtattctggaagtagatctgaaataataatcatcttggaaattcttgcctttcaaaggctttgagtttactgcaattctgactggattttgtcaacatttccaaaaccagagattagagaagtatatgcttcatcttcacaatggtaattataccatccactgccaataaaatctatattttgctcccgacttagccacgttttagcagagctctgaagtctttgctaggagacgttttgacttaggtaaggctcaccaacacatggattctcttttccagaaaacaaccccattccaagagctccgtgagtcccagactaaatgttcacagaaatgctctaatcctggatgttaaatttcatccagatttcagtgatgctggcagtgatgagtttgactctgactcgtcccttgttaaatctgtcctacctttctgacctcagctccatcctcagccctcagaaaagtttccctagccttgcttgggagactaaactcccccaagacatcatgtatctttcctttatagcatttaatgagcttataatactacatatacttacgtggtaatttgtttattatcagtcactctaataacctaaactccattaaacagggagcttatcaacattgtatccccagagtctaataagtgtctgttgcatatttgttgaatcatagaattaagaacttggaagtaaacaaaaatggggttaactgataactactaatataagctttcctaatagattttgagatgtttttcactttgcttttataaactgaaaagttgagagtatctaaaagaaatctcaccatttcaaaaatgttttgtagtgattattttctgtttgaacttaacttagagcttcctcacattcttttgcttcctttctttcaccccctctacaccatcctagaccatgtgtttattgtggctattagttctttcctaaaagaaactaccacttatctgggccgtctatgaaagtcagatagttttcaagttatagcatcactttaactgcaacccatttatagtcctaagtacatattaactaagtatttccctgtcttccaacaaaaatcacttttagacatgtggaaatctgggaaagattgcatgcccaaacacaaaataggccctggaaagtaaaaacagtaaaagcaggcatgtggttatttccaaagaaagtatttaatcaaattttaaatttctgatataattttttcttttgttaaggctataggatgtttgtgttattatatgtgtttatttcagccaaggaacgcctgtctgggtatctttaggccctttttgaatttctggtacttatatatttgtatgaaatattcaaggaaggtttttaaaacgacatgtaaaattaaatctgagcatttagaaggcacctagggtcagactcaaggtgaccagtgttgagcagctgtagggacactaggtgtgtttcctctgaatggtgtcccactgtggcctgttcccagccctcttctgtaccagcagcaggacctagcaagtaactcagaatgtgaaggcagttaaaaagatgatgaggtctgaaaattcctgaaccttcctggcctcatggaatgaatgtaccaaaaagcactccttggctgatctatattgttgggaaagagattgtagttaacattttcagatttcagggctgcctagattggtgtttgcctaggatggggatctactgtgagtgaataagcacatttttttagaagtgcagattttctgctttcatttagaaagtgttcttctggtgtggggttgtgatcacttttgaagttggaaattttcccagctgctgccctccacatctttttaactgctttagagcaggaacactttcatcagtgattctcattttgtactttgggctttgaaaaggatctccttaagcctacatagagacctaacttggtaattatttggctgtgacaagtttctcagtggcaagccctccatgaagtagatagatgtggtggttcacgttagatatggctagttacttgaatccttgaccctaagggatttttactagtattacttccttaacttatgaaaattttcaaacagtacaggaaaattggagattttttacagggaacacctatgtatatatacacacattatatgtgtgtgtatacatatatctatatatatatatatatgtatgctatatattctatatagtgtatatatacagtatatattctatatagtgtacatgtacactatatattctactctatagtatgtatactaagtatatactatatatactaaattctaatattaatagtttactctacatgctttattacatattcatccatttatcagtcctctatccacccatcaatctgtcttatttttagatgcatttcaaaataagttgtatataagtatgtttccccgtaaatacttcagcatgcataacattaactagaactcaatgtttgcagttttttcttttgatgtaaaatttacataaatcctaattataccatttaatgatttttgacaaacagctgtgcttgtttaaataaaactgctatcaaaatttagaacattatcatcactccagaaagttccctgaagcccttctgcagtcaacccctccccttctttcccacccccacccaccgcacaccacacctctgtcatgtgttcttctaccagagatgagctatgcctgtgcggccttatctatatggaatcttgtggtatgcactctttgatatctggcttcttttgttcatcacagattttttgagatccatccatattgtcctatatatcagtggttggttcttttatattgctggatagtattccattgaatgaatctagtgtttgtttatccgtactcctaataatgaacacctgttttccagctattatgaataaagctgccataaacattctagtatgtaccttttttttgtagacacatattttcatttctcttgaataaataaatacctaagagtggaatagctgggtcatggagtaagtaatcatttcattttataactaactgccggaccttttcccaaagctatttggcaactgtgctattctgtactcccagcaagaatgtaagagtctagttcctccacatccctgccagctttctggtgggtgtgtagtggtagagtgttgtggttttaatttgcatttctctgacaattcatattaaacacttgttcatgtgtttattggcctttcatgtatctttttcaaagtgtccaagtcatttactcatttttgttgtttgcttttatttttgagttgtacaaattcttcatgtaccctagataccagtcctttgtcagatacatgttttgtaaatgtatttcctcctgtggcttacctgtttttctgatgccttttatgagtagaagtttttaattttggtgaagcctaatttatccactttcttcttttgtggtttttgctatgtcctgagaaacctttgctacctggaagtcatgaagatactcttaagttttgtttctaaagcgttacggttttagcttttacatttagacccgtgatccatcttgaactgatttgtgttttactgaaattaaagatacaaaacagaaaactctcatagcaattctgttgtgatttgatagcttttaaatataacttggcagtcaaagtttgttttaaaataaactgtggttaagtgactcattggactgaggcaggctggctgatgatcaccgtgggttctgacaaggtgagagcagaaccagccattactcactatggctagagtcagtcatggctctccaggagaaatacaattcaattattggtaattgagaatttgaaaaaaatagctgcttagctgttttaaagatgtaggttagttcttaaattttgagttcaataatgaatctggatatagttattttacatttgtcattaaaagctcttaaaaatggtgtaactggtgaggtaactggagggcagtaactgagaggaaccctctatgatgagcagatgaacaacttccaattggtttgcaggaagttctgctttgattcctagataattgctttatgagacaagcctgtgtttagaggaaagttctctgattacaactcttaaaagataaatgatctaacttcattccttaacattgtaagaaggaattaatttttaaaagagagaaaatttgaagtactttgaaagaaaaatatagtaagaatatgtgattcatttttaaaattaaaatttggcatatccttatattcactccattaaaaaaaaaatctataatgctcagtaaatgttaattcatctgtgcccacgatgccaggacatgagtttagccagaatgttacgccttgggccccaaaatgtgatccatatattgaaaatatcagttttcttagtaactgggtaaaacttaaagaagagtcatgaattagaaggtataacccgaagaatgtttaaaaggtgcagtttgagcttatttatgctcataggatgtattcatggacatttccttaagacagagaaaacagtttttttccaaaggctttctttctgtttgtgattctaggatgtagcctctattgaattgaatatgtcatctacttttgatctttagtgcaaaagcattcactgcaggcataacttatttgaccacatctgcttgttttgatattattggtaacattttgcctactttacaaaaaaaaaaaggagggggcaaaacccaggagccagatagttacaatccagatggtttgaggggaaaatactaagagaaaatacttgattcaaaaccacccataaatattgagccatcactgaagttcttgttggaaacatgtctctgagctctgctatcctctgtcttggaaagagcctattagagtgctgatctttgctactagtactctgttgtactgttctcctggagagcataaacttgtcacccaaaagctagattgtggctggagttattttgatgggatatgtccctttattgtaaaaggctgtaagtccatctaaaaaggaactctcagacatgtttaccctaaaaccccagcttagggctgggcacagaggcggtgcaagacaaatatttattggcttgaaatgaaaaggttgctttatagccatgaaactgcaaaatgcaggaagggactatcagaaagctgatgttgacagtaaggagaaggatttttcatgcttaccaggcatcctctgcactccaggctagaatgtggagtatgtcgaaaaggtcaatcatcgcccttgctagatcttttcttaaattctggcccatatgctgagaaggatcagtggtgctctcaggctgcctgccacctgtttacattctgttactgcttctttgcctttgattttggccactgtctctccggaagtgtaggcatggataggttgcaaaaagacacggaattgattcaaaactcttcttactatctaataaagcaggaactagtctctaactttacacctgaaaaataagttaaaagccacttttgcctgtaatcccagcactttgggaggccgaggcaggcagatcatgaggtcaggagattgagaccatcctggctaacacggtgaaaccccgtctctaataaaaatacaaaaattagacaggcatggtctaatgtagctatcgggaggccgaggcaggagaatcgcttgaacccaggaggcggagcttgcagtgagcccagatcgtgccatagcactccagcctgggcgacagagcaagactccatctcaaaaaaaaaaaaaaaggccacttttacataagcagtaattaaactaagaagacttcgtttgtggcaatattcttcaagtctttcagagcgtaatttcttctttaacgaaagcatagatgcagattttagtttcctaacagcacacctccaccccagtcgaatacagagatgggtacattcaccaagatgaagtttatcaaatggtcatctaagaagccttttgaggcctgcaacagtgtagtaaaccacggcttgctgagaatgctggatctcagtcctcagatagctattttacagcaaattattttcatggtgattcctttgccccagtgggggctcctttctcagtttagcagtatgtcagaaatactttaaagattagcagatgtttgggttaataaaaaccatctttatcttctttgaggctattacacattcttactatgatttctttacacgggctttgaaaaaaagaaaaaactgcagtatttggcagagtttcatcattttaaatatttctttatcattatagaatgcacaaaacattgaatttaaatacttcttagtgaaaataagattaatggctcttgtcagccagacattgtagactctcagtatagcacctccttagatttgtagcctcactgcctcctccttagtcgattcttaccttgctcatgttcctctacctggaatgtcagacacagatatattattaaacagaaacagtgctgaggacatcgcacctggccaaagttacaattcatttgttaatgggacgaataatgtggcaattagccttgtttgagaggttatgacaagtcatcgaaggaaggttaaaacttcacatttgccagggacacttgttataactgaggccaatctgtctacagcagtttaggtgctcttcagagttttgggcagtgtgaccagtatctgaattttacaggagtttttaagtgtgacataaccttttagtaaatgtagaatatagtattgtatacaactaggatgggcttaaacaggatgaaactaaggttggaaggtaaactaatcacacataatatgcagttttatgtacatttttggagctctctgatgttcgaggcacttaagaagtcatacataatatacatgttatgtcaaatactgtaccagaggaatagaggatttgcatgtgatacagaccaaagggtatccaagcaaggcgacagaaagaatggccctcaggacagagggagcagcaagaccagagacaccagagcatgaacatgcttcctagatttcccagggagaggaatcgttccctatcctggggcatagcagctgcagggaatgacaggagacgtggctggaaagctggggccagatggcggagactcctcagctccacgttaacaacgtgctcccttggcaagccgtacagatcctttgaaggattttgagcagagaaatgacaagtttatactagaaacaagcagcatggaaggtaggctgcctgcatggagtctggaggaggagagcagcgcagagaatagtgtaaattcttcctgcaagtagtattgaggaggtacaaatgggaggatagaactggatttaaatagttttcagagagaagaaagtcaagtgaaataggacaaagagtccaaagtcagtccgtggtctccattcggagaaaaagggcttgggaaagaatatatggagtttggttttgaatgagccaaaattgaggtaccgaagaacatccaggtggtgaagcctataggagattggacatttttcatgtgattcttaggacagaagctggcactgagactagagattggggtatcatttgaataaaggtgagaattttgtctttatgtatagagttccttaagattctatcagaatccatgtcaagatacaatttttctgattaaaataatttcttttaaaacactataatgcagaaacttatgtgtaattattttatgttttgtaaccttaatgttaccgaacttgtgttaaataagtttatcttgtttgggtcacaacttttattccagagaaacgcagttcttattttgattttgccttaatactgatgatttttttttgaagttctttaatgttaagcattttcagtgtgacttttaaaattgctttccttaaaagtgactgtgaaattgctaagtaggctgagattgatgtcaggttatccccaagcataacctcactctcaccttgctttgcaggcatatctttttcttgcacatcaaggaggccctcttggcaggccacctcttgtgttccccagagcaggcagtggaactcagtgccctcctggcccagaccaagtttggagactacaaccagaacactgccaagtataactatgaggagctctgtgccaaggagctctcctctgccaccttgaacaggtgaggctgttgaatatagtattgtttacaactagaataggcttaaacaggatgaaactaaggttggaaggtaaactaatcacacataatatgcagttttatgtacatttttgagctctctgatgttcgaggcacttaagaagtcatacataatatacatgttatgtcaaatactgtaccagaggaatagaggatttgcatgtgatacagaccaaagggtatccaagcaaggggacagaaagaatggccatcaggacagagggagcagcaagaccagagacaccagagcatgaacatggcagcatcagggctactgcatatattcatagagctatcaaatgtataagcatttccaaaagaagatgaatctgtggtacatacacataatttgtgaagttaagactgggccattgcccaatttaaccaaatattttcaaaaaatttgttagccttttatttgaaaaatatgtaaacacaatatgaaatgctatataaaatgggaattttttaaatctgtgcctttaagtacaaatctcctaaaataaaaaatctattatgtatattggtgttttcttcatcccagcaagaattaaaccaggagatctaacataggcattttagttatctattcctgcataacaagttaccccaaaacttagtgacataaaacaacaaaaattgtctcacagttctgtaggtcaggaatctggccatgtcttggctgggtcctctggctcatgagactgtagtcaagctgcaggtagaactctgtctcatctgaaggctcgactgagggtggcctccatgccaggttgactcctgtggtttgttggcctacctccttccctggccacaggggcctcaggggtcaactttatacttataaactatatgtggacaaatgcatgagactttccaatatgtaaatttgacttatgtatatttttagagactttccataattcttccaattcatcacccatccagcatccccaaagtgtttttaccaagtatttaatagttgagatcccagtgtcttagacgttttttatagtaagttcgctaaatacatgaaacatcagtaatacataagttttaagttgttgtgattcatcagtgttagtatatttcactcgtgaagactacataggtttatctctaaagctaatatctgtatacttaattctctgtcctcttggtgtcctccagcattgttgcaaaacataaggagttggaggggaccagccaggcttcagctgaaataccaagttttgcagattgtgtcggcaatggaaaactatggcatagaatggcattctgtgcgggatagcgaagggcagaaactgctcatggggttggacctgaaggaatctcaatttgtaaagatgactttagcccaattaataggtaagccaagacttaactttttttgacctaagcatgtgtatacatctgtagctgtcaatgtaatagaaaataggaagggatttactcgacagtcagctcttaggaatgaaagatttcattttggtatgtacattaattttattcaggcctaaataaccattttaaatgttattcaaggtatacaatgtggcagagttaacgttttccaaataacccattcactgccataaaaaacttgttttcagctctagacatgcatgtgcgcacacccagcacttgctcccatacttccctccacatatgcccaactgcttttcactgtatctttacaataaggcagcattatggtgatgtgataaccccagaggaagcgtctgatttttctgctaggtcatgagcaaatggggatcccacaaaggcacacacatggtgaagaatcactccttctagatctgctttcttttctcttcctgtctcttaggatagcttatcctgtggtgcagatggccacccagtcaggaaagaatgtatatttgacggtcaccaaggaatctgggaacagcatcgtgctcttgtttaaaatgatcagcaccagggcggccagcgggctctaccgagcgataacagagacgcacgcattctacaggcacgtatctcgtgtgcttggtcacctcagcaccacagctctcaggtttttaggtgacaaccaggtttctacggttccttggattgttgtgtcaatgagtctagtacagaatttaagaaattctgaacattttgtttccgtagtagcagtggagtccttattaatgtagtcttgttttacccacagaaggtgcatgtgtgtgagctgcacaaacacattctctgcttacctcctaccgtattctcttatgccattaatctagacacaaagtgtgttaggagatttctatgcctatttaatcaatacaacaaccctaaggggttattattaccctaatgttaaagatgagggaactgggaggataattatttacttagtctaggactcagcttcaaagccaagtttgattaccctaaaggtaaccctgagggactgggcctgctccactgctcaggagaaggatagcacagatcatcttttctttctggcagagctgctatcctgagtcgtcactgtgtatggaaggattttttaatagcaatattgattccctcatttcagagggtactttaaagccaagttgtgattggacctcacgtatttggacaattaaagctaagaaatttaaagtcgtagacaactttaaacttttttattttaaaatagatacacaaattgtgaaacaggatgggaaatttttagacatttctaacctaaaagccaagacttcaggcagatgccctttttcttccataagcaacttcactcagtagcgtctgtcctggggaggaggtacgtgctcactgccctctgtatttactgctttacggaagccataatgtcaggagatgttagagaaacagaggtgtaatcactgagaatatttaccagacgtaaaactggaaggacttactttcatacatgcagacgagactatgaaacatctgctgacatttctgttcttattgacaacagcgaataagggtgctgccaggctctttggtgttaaagtagatgttcaatcttgccttgcaggtgtgacacagtgaccagcgccgtgatgatgcagtatagccgtgacttgaagggccacttggcatctctgtttctgaatgaaaacattaaccttggcaagaaatatgtctttgatattaaaagaacatcaaaggaggtgtatgaccatgccaggagggctctgtacaatgctggcgttgtggacctcgtttcaagaaacaaccagagcccttcacactcgcctctgaagtcctcagaaagcagcatgaactgcagcagctgcgagggcctcagctgccagcagacccgggtgctgcaggagaagctacgcaagctgaaggaagccatgctgtgcatggtgtgctgcgaggaggagatcaactccaccttctgtccctgtggccacactgtgtgctgtgagagctgcgccgcccagctacaggtaggggagtcagctgcccacttttgcctgcagcctcacctatccctcctcttaacggggagtaggagccaggtactggctcgctaatgcacagacggggaatgcccatcttcacccggaaagggtctttgtatttggtgacctaaaaggcattgccctttagaaacattttagattagcatactattttcaacaacataattactccaaattatgcagtgttttcaagttctgaaaatgaggctgagattcctgggtaacatatctagttagcggcttacctgaggacaagaatccaggcctcctgaggcctggcccagggctgcttcctctatttcaagttgcctccctttttctgacacttaggaggatggtctttattacttaagatatttgggaaagaatacttctcaattatccatggatgggttgttgactctgtgatattggtgattaatttccttttatgattgcaaatgcctcaagggcatatgggttggctgttatttattagcaagtcaaactaattttaatattaacacgaaaaagagaactcacatatagttttcttcctttcttgcatgaagaagaattttaaatttcctcttacaagttttttcaatttgtttttatttctcagatgtgtttgccaaatgtcactgtggttttatgtaaaactggttctagataatacttagtccttcagaagctgctaatttcagagctaataagaccaaatgacccctgtgtcctttccccagaagcagtcataggcttgtctttttctgcccacctattctgactctcatccctaagtctctcctgagggctgatgatgggcacgggctttctgagaagtcagccaggaatgtggagctgccacctacggctagaagcagagccaccctccctggccatgtgggcatcagcccagaaatgttggcctgagtcagtcagctgagctaaggacacacaatttcaagaagggtctcctgcattgctgcctgaagtgttatagtctactcatgtagagaccacattctgcacagaaagacgtcttcagtaattgctttattcaatgtaccttctttagcgtttcactaaaaatgtaattaatttccttcagtttatactatgtcatagtatttatttttaagcccttgtaaagtataaactttcaacctgtgagacggcaaagatctctaccaattgaaagctagaaatcactgtgatcacaattgatttagaaaattaaatgcactagagaccaggggtgtgcacagagacacaggccccccaccgaggcttgcatgctaacagagactgttggcttttctttcccagtcatgtcccgtctgcaggtcgcgtgtggagcatgtccagcacgtctatctgccaacgcacaccagtcttctcaatctgactgtaatctaatctgttgtgcttttgttggacttggcatgtttccatgaactgcactattataaactattaaaatgatagattgtggagaaagtaattattccaacacccatctgccatgcgatgttaaaaaaaaaaaaaaggaagaaaaataacacagctactcctcactgcaaaaacatatccatgcgtagaatcaacaactccagtcatgggaccaggaggagctctgggacgcagacacattccttggatgttgattttttttatgatctagtaaaggaataggtaaagtctttgatgtcagtgaagtggcaacatagccaaaaagttgggtaccttttaggaaatgatgttgtaagtctccttaatgtatcctgaggtaagtttcctactggcagcagattttgtaagaattacttttaagaatttcattctttttgtatggtcatggagctccaaccatttttaataggaaagtcttttgtaaattgttgtcgttttaatgtcatttctgtctttataacttgatcaagaatgattggaaggcaaacaggtttacaaatcaattctgtgacttttaaaaagttgacaatgttgtcagatttaaaccagtgtggctagtaaaaagcagctcactcaatgtgggtggctccctattcctttacgctccccctatccctaccccacaagcctttcgattataaaatactaccaatcttgttataagattactgtggagtagtcaagtactccccgggccttctgagctggtggaatattttatttcagactgaaaacagagagcactctccttgggaagggaaagcggagcttgctgagtgagagatggagcctcatggtgtacaactgagggtagttaactcatcacttctcccaagcactcgatcccagcttcacccactggtgttgctttgcttgaactgttcaagccttttatagccttaccataagtatttagatatggtgtccttttctgtttttggggggggagttttgttgtgtttttttaaagtaagtgcttaagtattaactttgggttgtcccctctgtatgtttcgaaggggttttggttctttttgcttctgttttcttaaacatgttttccactcccacttgggcattttggaagctggtcagctagcaggttttctgggatgtcgggagacctagatgaccttatcgggtgcaatactagctaaggtaaagctagaaacctacactgtcactttactgagatttctgagtatacttttcatattgccttaatgtagcagtaatgtgtttatgcatttgtttctttgcacagtacattttgtcaaatattaaaactctacttttttatggcacatattagcatataagcctttattccaagaggtatttattttttcacttgtaaaaaaataatgtttccacgtaaagaactctgttatatcctagaggactctgtcttttatattcgggataataaagactttaaagcaaacatggatgtgtgtattgtcatttaagccagttttatttcatttcaaagaaataagcaaggggtaacatcacagttagtatctactttcctcctaccgggaatttaattttttttttttaataatttcggtgctctacaaattcagagaaacttctttagtaacaaactatagaaatgatccttgagagtatagtctttttttttttttttcaagaaaacttgaaaatatttgtggtattggttctaatggagatcacttcaccaggttattctcttatttatgtctttgggtggttagattggtatgtaggggaaaatggggtcatgaacataagcagatgaaaagaaaaaatcaggacaagtactggaagctattggagaaggaaggaagtggcaaagctggaagttaacaattaacaacccagctggtgctgctggtgtgtggcctgctcaagacaggggagtggcctgggtcatagcagtaagggcctcgggctacagaagctcgggctgtattcctgcaggactgctggtctactcctgctaggtcctaactgctctatgcttgccagtgtgtgctcatctgtgtttctccagaaatacattttggaatagagaatattgtacataatatatataagtgataattatctgtagcaattggaagaagtaaatttattttttttaattagaggcaggggtatttgtttttactgtacctataacctaagtcaatcttccatcaatttctaggaattaactaatttgttcattcaacacatttattgaaacctactaagttattgagccctggaaatttagcagtcatcaagacataaatgattctggatgcctgtatcatgtacttagcctgtaacgtgtacttttgtctctgcgcggaagttagataatatgcagaatccacgaatactagcatcagagggagtcttgggcataccagtatcaaaatgctaaccaagttgatggagggatggatggatgacaggctgacagataagattacatattattcaccccactagaccatatggacgccttaagctcagtgactaacatgaaaaccactatattacatggtggcatcatagaattagaagggaagaacagtggaggcacaggaggcagggattcattgtgcttaggagccaaggataaaggtgcttcataaaagatctgagcagatccttgacattctagttggaaaaagaaagtgcatagcccatgccagggctggagcacagtctgctggggctggcccacccgctgcatgtcagtgaactggtaagaaattgggctctgaaggaacatgtgatgtagagtcacagtggtggggaatcttgaattccaggtttaacatggacatggttctccactgccttcagaacaaggaacttttgggacggggtagcaatcagatctggttcttgcacagagaagaagtccaagagcagaaagagaacagtggcagagaactcaattttgaccatctgtcaacatgaaaagaatgagacagagtcaaaatactttagaaatatggtcagcattactgagagagacaagtcgtatgaaaatcctgtttctgacttggaatagatagcctttaatggagggacaaaaaagggagcaagtcctgaaagtagaaaggaaattacaacagggtttggccacacatttgagatgcttggtgatgggcaaacctggaggtagttgaaagcgtgggttggaacttccagaggatgatgaagataaagagaaacatttggtggccattacatttcactgatatttgaagacatgacaacttagaagtcatccataggagtgtgaaaggagggaaagaatgaagctgagcatgcgtccctgaaaggacccacatctaaagtgaacagcgagactatgaaggtatttgagaaagaaccgacaacaggatagggataacgaggggcagaaagctaagccaggagacagctgcaaagaggcggtcagctgtgttaggactgctgcagggtcaaggaggggagtatcaagaaagccataacatgtggcagtatgaggaagtgtcagggcttaagaaagagtgggtgcattttcagaagtgaggggatactaagaggttaccagattgtagtgagctgagtacaaatgtgaggtgaggatgcggaagtggtcagtcaaggagatggcaccataggagaaggcagggccacgagaagtgttttgactttgggttttaaataggaggccctgtgtaggcatagaggagaggagggcctctcctatgcactacagtggtgcatgcttgtagttccagctactcggaggccgggaggcgagaggattgcttaagaccaggagttcaagaagagagggtgaacgaagattcagctaaggggccaaaagaggaataaatggagagcctggatctttggaacactggagaaactgaagactcaacaggcggatctgccaaagataaaatttacaagacttgaacaaaatcattctttggtctttttattaagggtttcaaaaatcagtgaaaaagggagttattcccatcctaccccattccagtatgtttattgtatatttatcttgtcacaggatgagctcgaatgcaacgctgggaagttctggggggaagtgtccccttaactctgccattgaacaccaaggatcagacgccccacaggagagcacgcatgggtaaaagcatgagctcttccaagaacaatatgagaaaaaaggtatgccccgtagaacaggtgtggggaaatttccaaacacatgcattagaaaaagtgcagcggtggctcacgcctgtaaccccagcactttgggaggccgaggcgggtggatcacgaggtcgggagatcaagaccatcctggctaacacagtgaaaccccatctctgctaaaaaaaaaaaaatacaaaaaatcagccaggcacggtagcgggtgcctgcagtcccagctactcaggaggctgaggcaggagaatggtgtgaacccaggaggcagagcttgcagtgagccgagatcgcgccactgcactttggactgggcgacagagtgagactccatctcaaaaaaaaaaagaaaaaagaaaaagaaaaagtgcatgcacacgtcaccacgtttgcatgtgcgcctgaaggaggggtccaagggatatttgtgtgtttggagagcctaaaataaattaggaaggttgaagtttttaataccatctgaccaagcaatggggaaaagtacctaagtggagtttaagcaccatctgaatttcagacaaaaacacaatcattcttgtctttttcactgcttttcacatttagtgtcttctcatagaaattccaaaacattgcagattacttatattcatatctgtagagtcttcttgaaattcatttattcaaaaactgcaggatattaaagagttagccctatgcctcttaaaaacaaaactatgtcaggaccacacaaatgatacagattgaacagacctgccggttgcttagagaaaaaatacactttaagcaaaagctaaacatctgttgttcataaagcttgccatagtgctaagggcaagaaaaacttaaagggggaagctcttttttctatcaaggagtgattcttctagttgagaagaaggtatctatatgaaacaaaaagataagcagttctaaaaccacacataatgaatatgtagatatatgtatattacatatgtattcttgtatgaatggatgccagtgaatggaggaggacttcttaaagtgggtaagttgttctttgtcttgaagtaagtacaggatttggattgatggaaagggaaagcatgagaatgcaaaagagcccacagacgaggagcaaagggtacaagagaggacagaagtagagccagttcatgaagagacatgactgctggaataaaaatttcagctttgctttgatacgtatgtgaaagctacagtaaggagtttatacgtttgattcatttggccttttattccttaacttgggcattgatttattaattcagcaagtgcacattacatacctagaatatatcaggctctccgttagggctagggcagtggttctggttcaggggcaatattggcccccaggaagcactgagcaatgtctggagatgttcttcaagggtcacaatgcgggtaggtgactactggcatttagtgggtagagggcccaaatgctgccaaacctcctaaaatgtacagtataacaccccctacagcaaagaatattgacatttctggcccaaaacatcagtattgctgctgttgagaaaccctgggctgcatggtacagatatctgagatgtagttcttgcctgctctgggattccaagggcagtggaagctgtaaactaataattccactctactaagttctacaatcaaagcaggtatcaggtgctgtggaagagcagaagatttgccactcactttgcttcaggttggaaggttttctggaggaaggttgcattggagaggagtcttggaaggtgagccagagcttgccaggtagggaaggtgggtggaaggagccagttcaaaaatgtagcatatttggggaccagtgggcagtttggcatgactgaaatacagggtatgtggttggatgggttgggatgaaataatgggagatggggttggggagttagggttggaatcttatccaggaaggtgctagaggccctggtaacccctactcccagccctactgataaggtcagtgtccacaaagatcataaaagggaatcaagaagtgctgggttcctcagttctgttcactgcactcttttctcttgtccatagatcttacttcctagcctgggctctgccaagcatgtgtcctctgagtttttagtaaaggtaatagcaaaataaaaccattgctagtaatgtgccctagagatgggagctgtcaggtaatcatttagaatttaaaagctcgtctccacattccttcagatgaagaaaacggtaggataaaaatatagcacagcttattagtaacatcttacccattttttccctaaatggttagaacatgctgcctttccctgctctttacatcagcgtttccgttattaaagctatttttcagttctaaatcctaggaggattttccccatgaatttaacatgactgaggaaacttgctccagggtaaaactttgctgcaaattatctgagataggcttcttaataaagagaggaaaaatgaatcatagccttgtagtagtttcaaatgtggagttacctttctccttcatccccactatcatgattattcataatagacatgggccagctttataaataattacacacaacaaaagtcctttgtgttcaacactggaggctgctgctgatgcgggccaggagagtgtgtgtgccagagttaggggagagagcgcgagagccaggcaaagctgctgtgtctaaacttctcaaaaggtcatccctacatatgaggtgtgacacccctagactcaggcagcacgttttgaaatgggactcgggttacctgttcaagctgaagtccctacaaatgtatagccatgactttcctggtctttagatattatataggctcttctaaatgcaagtgtaacttacacaaatgaacaattatactggaaaaggaaactattaaagcagcttataaatccctcccagcaccctctcttctcctcccttgctgcaggacaaagggtaagccatacccctatgcttttgtctgtgggagccatgaaccccacctctacttcagtaatagatgctaaagagcttttccctcttcatatcacctctatgtttgaaagctctttctccttttaaaaaaattaatttttcttttttttaaggagatggaggagtcttgctatgttgtccaagctggcctcaaactcccagacctcagcgtctcgaatagttgcgactacaggaacatgccatctttctccttttaagaagaagccatgcctcccctctcccctctggtatttaacctaaatttacatgctgtacctaaggatctttggtggagtccctgagcgggtggttctaaaggcttgatgggaattggttcatttcattctcacaacatgcccgtgaagcagagattctccttggcctcattttacagatgaggacctcaggcacagagagctggagtgacttgctcaaggtcacagagctggaaagaggagagccaggagtcacacgcagggctccaagtgttccccccaacccacccacagcactgcttctgaggggcagccttacacatggcccgggatgctccaaaaggttgaccttaccacagaccatccgaagggacaaaatggccagtacacttgttctctttgtttttgttttgctttgcttttaaggagtgtgactaacagcccaaaccctctccactagtgccctggagtttgagggtacaacctttgattgcaccagtcagtcctcattaatgagggctcttaggcttccccctttgcacagccccatcccagcccaggaagccattttacagcaatatatgtgtatatattaattaccacgcatttttatggggaaaacaccttaaataaacagtgagaaggcagacaggtaaaatcaaataggataacaattctgggatctccagtgctctatttgactcactgaaaggactgtggaaatcaactggaggccttcactcctggcaagccttcacagtttcagagtttccatgttattactcatctccttgctggcccttctcctcccagctttgaatttccaccactaagctctagggaaagaacaagagctgtgggctagtcaggccttagtggggaggcagagaattcatgcacatccttcagctgtgcagcggacccccaagggcagctcctgttccaggcccacacccaccgggaatctggccaaaagaccagagccaactccacaaagcatttctgagaaatggatatttcactcaaggctttgaggaaagattctcattatacaggacatgtggcaaaaaatatccaaaaccccctacttaagcatctctgtttctcccttccagacacaataaacagcaacaaagggaggggcaagggaatgaatgactaaaggaaggacaaagtggaagaagagaaagaacaagggaatgaaaaatacttttctgtgaatgtaggtgaaccaagtatcttctctggctgagttagcaaaggggaattctatggggagatgacagtgaagcgggaaatttccctgacccctttgcaagtgggaactggagtgcaggcactggagttagccggctgcttcggcactggcaggggcgaactccactcactcgaacccattgctctcagctcctcatgggagggaatgcacaggtgagtggatgcaggaactggggtgagtgctttcaggcaccagcaggagcaaaactttgtgtgggccccgtggcagcatctagtggggagaacctgtgatgctgtccatggacagcttaagtattaaacagctcagtgggccctctgcctttttgcgtgagatagttgctttccaccagcaagggtagaaggtcagtgtgacagcctttcttttctgcacctgtggcactgagctcttgtttggtgtccaggaaaaatcaggtagcacgaacaaattgaagagtggtgaatgtggaggattttattgctgacgaaagtgatgaagggaacctgaaaaggggatggagtgggaagctatgctttcaagccgtccctctgaagtcaagcctatccctctgatgtcaagctgcttctctccaacatccagctgcttctcctccctctgacagctgagcctggggtttttatgggcacaagactggaggcagggtgggccatgggtggttttggaaaagtcagcattccagacagaaaacagagatgtaaactctcactttgagccacaggattgggctttttggcttgagggtggagccctcaccagggacccgacctcttctgcccagaatttctcaccctcctgtccctatcaacggtaaaataaacatgtgaacatatttgctgcttctcttctctttatggctctgcattatttatgaaccatgaaggtaaatttcaatggcaggagagtgaaggtggtggacttctttccaaaatttctctgaccatctctatgcaatttgccaagagaaggaagacacaagctgcacctcttactgcaggccttactgaggctttatggaggaaatcaatcacaagttatccataaagctttggggcacccaagttgctcaactacagctataaaaggaggataagtctatctggcagagcctcagtttactgtactagaacttgaatatccgtggcttgggaataaaggaatgatcacatttgaatgcaaatgtctagggaaagcagatatagctt

SEQ ID NO: 33 - DNA, 1362 bp, Homo sapiens
tgcgcagctctgcaaaagtttctgctcgggatctggctctcttccccttggactttagaacgatttagggttgacagaggaaagcagaggcgcgcaggaggagcagaaaacaccaccttctgcagttggaggcaggcagccccggctgcactctagccgccgcgcccggagccggggccgacccgccactatccgcagcagcctcggccaggaggcgacccgggcgcctgggtgtgtggctgctgttgcgggacgtcttcgcggggcgggaggctcgcgccgcagccagcgccatgcaaaactacaagtacgacaaagcgatcgtcccggagagcaagaacggcggcagcccggcgctcaacaacaacccgaggaggagcggcagcaagcgggtgctgctcatctgcctcgacctcttctgcctcttcatggcgggcctccccttcctcatcatcgagacaagcaccatcaagccttaccaccgagggttttactgcaatgatgagagcatcaagtacccactgaaaactggtgagacaataaatgacgctgtgctctgtgccgtggggatcgtcattgccatcctcgcgatcatcacgggggaattctaccggatctattacctgaagaagtcgcggtcgacgattcagaacccctacgtggcagcactctataagcaagtgggctgcttcctctttggctgtgccatcagccagtctttcacagacattgccaaagtgtccatagggcgcctgcgtcctcacttcttgagtgtctgcaaccctgatttcagccagatcaactgctctgaaggctacattcagaactacagatgcagaggtgatgacagcaaagtccaggaagccaggaagtccttcttctctggccatgcctccttctccatgtacactatgctgtatttggtgctatacctgcaggcccgcttcacttggcgaggagcccgcctgctccggcccctcctgcagttcaccttgatcatgatggccttctacacgggactgtctcgcgtatcagaccacaagcaccatcccagtgatgttctggcaggatttgctcaaggagccctggtggcctgctgcatagttttcttcgtgtctgacctcttcaagactaagacgacgctctccctgcctgcccctgctatccggaaggaaatcctttcacctgtggacattattgacaggaacaatcaccacaacatgatgtaggtgccacccacctcctgagctgtttttgtaaaatgactgctgacagcaagttcttgctgctctccaatctcatcagacagtagaatgtagggaaaaacttttgcccgactgatttttaaaaaggaaaaaaaaa

SEQ ID NO: 34 - DNA, 2094 bp, Homo sapiens
gttggcgaggagtttcctgtttcccccgcagcgctgagttgaagttgagtgagtcactcgcgcgcacggagcgacgacacccccgcgcgtgcacccgctcgggacaggagccggactcctgtgcagcttccctcggccgccgggggcctccccgcgcctcgccggcctccaggccccctcctggctggcgagcgggcgccacatctggcccgcacatctgcgctgccggcccggcgcggggtccggagagggcgcggcgcggaggcgcagccaggggtccgggaaggcgccgtccgctgcgctgggggctcggtctatgacgagcagcggggtctgccatgggtcgggggctgctcaggggcctgtggccgctgcacatcgtcctgtggacgcgtatcgccagcacgatcccaccgcacgttcagaagtcggttaataacgacatgatagtcactgacaacaacggtgcagtcaagtttccacaactgtgtaaattttgtgatgtgagattttccacctgtgacaaccagaaatcctgcatgagcaactgcagcatcacctccatctgtgagaagccacaggaagtctgtgtggctgtatggagaaagaatgacgagaacataacactagagacagtttgccatgaccccaagctcccctaccatgactttattctggaagatgctgcttctccaaagtgcattatgaaggaaaaaaaaaagcctggtgagactttcttcatgtgttcctgtagctctgatgagtgcaatgacaacatcatcttctcagaagaatataacaccagcaatcctgacttgttgctagtcatatttcaagtgacaggcatcagcctcctgccaccactgggagttgccatatctgtcatcatcatcttctactgctaccgcgttaaccggcagcagaagctgagttcaacctgggaaaccggcaagacgcggaagctcatggagttcagcgagcactgtgccatcatcctggaagatgaccgctctgacatcagctccacgtgtgccaacaacatcaaccacaacacagagctgctgcccattgagctggacaccctggtggggaaaggtcgctttgctgaggtctataaggccaagctgaagcagaacacttcagagcagtttgagacagtggcagtcaagatctttccctatgaggagtatgcctcttggaagacagagaaggacatcttctcagacatcaatctgaagcatgagaacatactccagttcctgacggctgaggagcggaagacggagttggggaaacaatactggctgatcaccgccttccacgccaagggcaacctacaggagtacctgacgcggcatgtcatcagctgggaggacctgcgcaagctgggcagctccctcgcccgggggattgctcacctccacagtgatcacactccatgtgggaggcccaagatgcccatcgtgcacagggacctcaagagctccaatatcctcgtgaagaacgacctaacctgctgcctgtgtgactttgggctttccctgcgtctggaccctactctgtctgtggatgacctggctaacagtgggcaggtgggaactgcaagatacatggctccagaagtcctagaatccaggatgaatttggagaatgttgagtccttcaagcagaccgatgtctactccatggctctggtgctctgggaaatgacatctcgctgtaatgcagtgggagaagtaaaagattatgagcctccatttggttccaaggtgcgggagcacccctgtgtcgaaagcatgaaggacaacgtgttgagagatcgagggcgaccagaaattcccagcttctggctcaaccaccagggcatccagatggtgtgtgagacgttgactgagtgctgggaccacgacccagaggcccgtctcacagcccagtgtgtggcagaacgcttcagtgagctggagcatctggacaggctctcggggaggagctgctcggaggagaagattcctgaagacggctccctaaacactaccaaatagctcttctggggcaggctgggccatgtccaaagaggctgcccctctcaccaaa

SEQ ID NO: 35 - DNA, 2193 bp, Homo sapiens
atggcaggatttaagcgagggtatgatggaaagattgctggattatatgatctggataaaaccttgggtcgaggccattttgccgtggttaaacttgccaggcatgtctttacgggtgaaaaggtggcagtaaaagttattgacaagacaaaactggacactctagctactgaacttggggatggaggagatatgtttgattatataatgaaacatgaggagggtcttaatgaagacttggccaagaagtattttgctcagatagttcatgctatatcttattgccataaactccatgtggttcacagagacttaaaaccagagaatgtagtcttctttgaaaaacaaggtcttgtaaagttgacagactttgggttcagcaacaaatttcaaccagggaagaagctcactacaagctgtggatctcttgcatattccgctccagaaattctgcttggtgatgagtatgatgcacctgcagtagatatttggagtctgggagtgatccttttcatgttggtgtgtgggcagccgccctttcaagaagccaatgacagtgaaacactgacaatgatcatggattgcaaatatacagtaccatcccatgtgtctaaagagtgtaaagacctaatcacacggatgctacagagagatcccaagagaagggcttctttagaagagattgaaaatcatccttggcttcagggagtggacccttcaccagctacaaagtataacattccccttgtgtcatacaaaaatctctcggaagaggagcacaacagcatcattcagcgcatggtgcttggggacatagcggatcgagacgccattgtagaagccctggaaaccaacaggtataaccatatcacagccacatacttcctgctggctgaaaggatcctgagagaaaagcaagagaaagaaatacagaccagatctgcaagcccgagcaatatcaaggcccagtttaggcagtcatggccaaccaaaattgatgtaccccaggaccttgaggatgacctcacggccactcctttgtcccacgcgactgtccctcagtctcctgctcgggctgctgacagtgtcctcaatggccacaggagcaaaggcctgtgtgactcagctaagaaagatgacctccctgagttggctggaccagcactctctacggtgccacccgcaagcttaaaacccacagccagtgggcggaagtgtctgttcagggtggaagaagatgaagaggaagatgaggaggacaagaaacccatgtccctctcaacacaagtggttttgcgccggaagccatctgtaaccaaccgcctgacatccaggaagagtgcgcccgtcctcaaccagatctttgaggaaggggaatctgacgatgagtttgacatggatgagaatctgcctcccaagttgagcaggttaaagatgaatatagcttctccaggtacagttcacaaacgctaccaccggaggaaaagtcagggccggggctccagctgcagtagttcggagaccagtgatgatgattctgaaagccggcggcggctcgataaagatagcgggttcacctactcctggcaccgacgggatagcagcgaggggccccctggcagtgagggggatggcgggggccagagcaagccaagcaatgccagtggaggggtggacaaggccagccccagtgagaacaatgctggtgggggcagtccctccagcggctcgggtggcaaccccaccaatacatcgggtaccacacgccgctgtgccggccccagcaactccatgcagctggcctctcgcagtgctggggagctcgttgagagcctcaaactcatgagcctctgcctcggctcccagcttcatgggagcaccaagtacattattgatccacagaatggcttgtcattttccagtgtgaaagtccaagagaaatctacgtggaaaatgtgcattagctccacagggaatgcagggcaggtccctgcagtgggcggcataaagtttttctctgaccacatggcagataccaccactgaattggaacggataaagagcaagaacctgaaaaataacgtgctgcagctacctctgtgcgaaaagaccatctctgtgaacatccagcggaaccctaaggaggggctgctgtgcgcatccagcccagccagctgttgccatgtcatctga

SEQ ID NO: 36 - DNA, 354 bp, Homo sapiens
atggctccggccgcggaccgagagggctactggggccccacgacctccacgctggactggtgcgaggagaactactccgtgacctggtacatcgccgagttctggaatacagtgagtaacctgatcatgattatacctccaatgttcggtgcaattcagagtgttagagacggtctggaaaaacggtacattgcttcttatttagcactcacagtggtaggaatgggatcctggtgcttccacatgactctgaaatatgaaatgcaggttagtaatgatgaaattgacaaatgcttatttctcttaattcagaagtacttcagatttgagaaaagagcacataactatggctaa

SEQ ID NO: 37 - DNA, 2272 bp, Homo sapiens
cacggccaaccgcctgttggggttcgggggcggcggcgaagcccggcaggtgcgcttcgaagattacctgagggagccagcccagggggacctcgggtgcgggtccccgccccaccggcccccggcgccgtccagcccggagggacctgacactggccaaaagaagaccctagacaagaaagatggaagacgaatgtcttttcagaaacctaaagggactattgagtatactgttgaatcaagggattctttgaatagcatagccctgaagtttgatacaacacctaacgaacttgttcaattaaataagttattctcccgagcagttgttactggacaggttctgtatgttcctgatcctgaatatgtctccagtgttgagagctctccatctctaagccccaatcctgatgtccatccaacagaagcaactccctcatctactttcactggtattcgacctgcacgagttgtatcttcaacttctgaggaggaggaagcatttactgagaaatttcttaaaattaattgcaaatatattaccagtggcaagaaaatgacaggaagtaacactgaggaaatagactcaagaatccgagatgcaggtaatgatagtgccagcactgctcctaggagcactgaggagtctctttctgaagatgtgttcacagaatcagaactttcccctatacgagaggagcttgtatcttcagatgaactgcgacaagataaatcttctggtgcgtcatcagaatctgtgcaaactgtcaatcaggctgaagtagaaagtctgacagtcaaatcagaatctactggtactcctggtcacttaagatctgatactgaacattctacaaatgaagttgggactttatgtcataaaactgatttaaataatcttgaaatggccattaaggaagatcagattgcagataactttcaaggaatatcaggtcctaaagaagacagcacaagtataaaaggtaattcagaccaggattcttttcttcatgagaattcgttacaccaagaagagagtcaaaaagaaaatatgccttgtggggaaacagcagaatttaaacaaaagcaaagtgttaacaaaggaaaacaaggaaaggagcaaaatcaggactcacagacagaggcagaagagctacgcaaactttggaaaacccatactatgcaacaaactaaacagcaaagggaaaatattcaacaagtgtcacaaaaagaagctaagcataaaattacatctgctgatggacacatagaaagttctgcacttttaaaagaaaagcaaaggcatcgattacataagttcttgtgtctcagagttggaaaaccaatgaggaaaacgtttgtatctcaagcaagtgctacaatgcaacagtatgcacagagagataagaaacatgaatattggtttgctgtgccacaagaaaggacagatcacttgtatgccttcttcattcagtggagtccagaaatatatgcagaagatactggcgaatataccagagaacctggatttatagtagtaaaaaagattgaggagtctgaaacaattgaggattctagtaatcaagcagcagccagagaatgggaggtagtgtcagtggctgagtatcaccgcaggatcgatgctctaaatactgaagaactgcgcacactctgcagacgcctccagattactacaagggaagacataaattcaaagcaggttgctacagtgaaagcagacctggagtctgaatcttttcgaccaaacctaagtgatcccagtgaacttttactgccagatcaaattgaaaagcttaccaagcatcttccaccaagaacaattggctatccatggactcttgtttatggtactggaaaacatggcacaagcttgaaaactctttatcgaacaatgacaggtttagacaccccagtgctgatggtgattaaagacagtgatggacaggtttttggtgcgttagcatctgaaccactgaaagtgagtgatggcttttatggtactggagagacctttgtttttacattctgtccggagtttgaggtctttaagtggacaggagataatatgttttttatcaaaggagacatggattcactagctttcggtggtggaggaggagaatttgcgctttggcttgatggagatctctaccatggaagaagccattcttgtaaaacgtttgggaatcgtacactttctaagaaggaagatttctttatccaagatattgaaatctgggcttttgaataa

SEQ ID NO: 38 - DNA, 594 bp, Homo sapiens
attatatatgaacaagaaggagtatatattcactcatcttgtggaaagaccaatgaccaagacggcttgatttcaggaatattacgtgttttagaaaaggatgccgaagtaatagtggactggagaccattggatgatgcattagattcctctagtattctctatgctagaaagaaaattaaaaaggacccttatacggcaactatgataggattttccaaagtcacaaactacatttttgacagtttgagaggcagcgatccctctacacatcaacgaccaccttcagaaatggcagattttcttagtgatgctattccaggtctaaagataaatcaacaagaagaaccaggatttgaagtcatcacaagagaattgccacaagcagtctgtgagatccttgggcttcaaggcagtgaagttacaacaccagattcagacgttggtgaagacgaaaatgttgtcatgactccttgtcctacatctgcatttcaaagtaatgccttgcctacactctctgccagtggagccagaaatgacagcccaacacagataccagtgtcctcagatgtctgcagattaacacctgcatga

SEQ ID NO: 39 - DNA, 942 bp, Homo sapiens
tggcaccgaggcgcctgcagccgcactcgccagcgactcatctctccagcgggtttttttttgtttgtcgtgtgcgatcctcacactcatgaacatacacaggtctacccccatcacaatagcgagatatgggagatcgcggaacaaaacccaggatttcgaagagttgtcgtctataaggtgtttgatatcagctgctaccaggaatccctggcaccgtgcttttgcctgtctgctcatagtaacatcaaccaaatcactgaaattatcctgggtgagaccaaagcctatgtgttctttgagcgaagctatggggacatgcattccttcgtccgcacctgcaagaagctgagagaggaggaggcagccagactgttctaccagattgcctcggcagtggcccactgccatgacggggggctggtgctgcgggacctcaagctgcggaaattcatctttaaggacgaagagaggactcgggtcaagctggaaagcctggaagacgcctacattctgcggggagatgatgattccctctccgacaagcatggctgcccggcttacgtaagcccagagatcttgaacaccagtggcagctactcgggcaaagcagccgacgtgtggagcctgggggtgatgctgtacaccatgttggtggggcggtaccctttccatgacattgaacccagctccctcttcagcaagatccggcgtggccagttcaacattccagagactctgtcgcccaaggccaagtgcctcatccgaagcattctgcgtcgggagccctcagagcggctgacctcgcaggaaattctggaccatccttggttttctacagattttagcgtctcgaattcagcatatggtgctaaggaagtgtctgaccagctggtgccggacgtcaacatggaagagaacttggaccctttctttaactga

SEQ ID NO: 40 - DNA, 3323 bp, Homo sapiens
atgaagattttgatacttggtatttttctgtttttatgtagtaccccagcctgggcgaaagaaaagcattattacattggaattattgaaacgacttgggattatgcctctgaccatggggaaaagaaacttatttctgttgacacggaacattccaatatctatcttcaaaatggcccagatagaattgggagactatataagaaggccctttatcttcagtacacagatgaaacctttaggacaactatagaaaaaccggtctggcttgggtttttaggccctattatcaaagctgaaactggagataaagtttatgtacacttaaaaaaccttgcctctaggccctacacctttcattcacatggaataacttactataaggaacatgagggggccatctaccctgataacaccacagattttcaaagagcagatgacaaagtatatccaggagagcagtatacatacatgttgcttgccactgaagaacaaagtcctggggaaggagatggcaattgtgtgactaggatttaccattcccacattgatgctccaaaagatattgcctcaggactcatcggacctttaataatctgtaaaaaagattctctagataaagaaaaagaaaaacatattgaccgagaatttgtggtgatgttttctgtggtggatgaaaatttcagctggtacctagaagacaacattaaaacctactgctcagaaccagagaaagttgacaaagacaacgaagacttccaggagagtaacagaatgtattctgtgaatggatacacttttggaagtctcccaggactctccatgtgtgctgaagacagagtaaaatggtacctttttggtatgggtaatgaagttgatgtgcacgcagctttctttcacgggcaagcactgactaacaagaactaccgtattgacacaatcaacctctttcctgctaccctgtttgatgcttatatggtggcccagaaccctggagaatggatgctcagctgtcagaatctaaaccatctgaaagccggtttgcaagcctttttccaggtccaggagtgtaacaagtcttcatcaaaggataatatccgtgggaagcatgttagacactactacattgccgctgaggaaatcatctggaactatgctccctctggtatagacatcttcactaaagaaaacttaacagcacctggaagtgactcagcggtgttttttgaacaaggtaccacaagaattggaggctcttataaaaagctggtttatcgtgagtacacagatgcctccttcacaaatcgaaaggagagaggccctgaagaagagcatcttggcatcctgggtcctgtcatttgggcagaggtgggagacaccatcagagtaaccttccataacaaaggagcatatcccctcagtattgagccgattggggtgagattcaataagaacaacgagggcacatactattccccaaattacaacccccagagcagaagtgtgcctccttcagcctcccatgtggcacccacagaaacattcacctatgaatggactgtccccaaagaagtaggacccactaatgcagatcctgtgtgtctagctaagatgtattattctgctgtggatcccactaaagatatattcactgggcttattgggccaatgaaaatatgcaagaaaggaagtttacatgcaaatgggagacagaaagatgtagacaaggaattctatttgtttcctacagtatttgatgagaatgagagtttactcctggaagataatattagaatgtttacaactgcacctgatcaggtggataaggaagatgaagactttcaggaatctaataaaatgcactccatgaatggattcatgtatgggaatcagccgggtctcactatgtgcaaaggagattcggtcgtgtggtacttattcagcgccggaaatgaggccgatgtacatggaatatacttttcaggaaacacatatctgtggagaggagaacggagagacacagcaaacctcttccctcaaacaagtcttacgctccacatgtggcctgacacagaggggacttttaatgttgaatgccttacaactgatcattacacaggcggcatgaagcaaaaatatactgtgaaccaatgcaggcggcagtctgaggattccaccttctacctgggagagaggacatactatatcgcagcagtggaggtggaatgggattattccccacaaagggagtgggaaaaggagctgcatcatttacaagagcagaatgtttcaaatgcatttttagataagggagagttttacataggctcaaagtacaagaaagttgtgtatcggcagtatactgatagcacattccgtgttccagtggagagaaaagctgaagaagaacatctgggaattctaggtccacaacttcatgcagatgttggagacaaagtcaaaattatctttaaaaacatggccacaaggccctactcaatacatgcccatggggtacaaacagagagttctacagttactccaacattaccaggtgaaactctcacttacgtatggaaaatcccagaaagatctggagctggaacagaggattctgcttgtattccatgggcttattattcaactgtggatcaagttaaggacctctacagtggattaattggccccctgattgtttgtcgaagaccttacttgaaagtattcaatcccagaaggaaactggaatttgcccttctgtttctagtttttgatgagaatgaatcttggtacttagatgacaacatcaaaacatactctgatcaccccgagaaagtaaacaaagatgatgaggaattcatagaaagcaataaaatgcatgctattaatggaagaatgtttggaaacctacaaggcctcacaatgcacgtgggagatgaagtcaactggtatctgatgggaatgggcaatgaaatagacttacacactgtacattttcacggccatagcttccaatacaagcacaggggagtttatagttctgatgtctttgacattttccctggaacataccaaaccctagaaatgtttccaagaacacctggaatttggttactccactgccatgtgaccgaccacattcatgctggaatggaaaccacttacaccgttctacaaaatgaagacaccaaatctggctgaatgaaataaattggtgataagtggaaaaaagagaaaaaccaatgattcataacaatgtatgtgaaagtgtaaaatagaatgttactttggaatgactataaacattaaaagaagactggaagcat

SEQ ID NO: 41 - DNA, 927 bp, Homo sapiens
tccggaaacgggtcgtggagctccgcaccactcccgctggttcccgaaggcagatcccttctcccgagagttgcgagaaactttcccttgtccccgacgctgcagcggctcgggtaccgtggcagccgcaggtttctgaaccccgggccacgctccccgcgcctcggcttcgcgctcgtgtagatcgttccctctctggttgcacgctggggatcccggacctcgattctgcgggcgagatgcccctgggacacatcatgaggctggacctggagaaaattgccctggagtacatcgtgccctgtctgcacgaggtgggcttctgctacctggacaacttcctgggcgaggtggtgggcgactgcgtcctggagcgcgtcaagcagctgcactgcaccggggccctgcgggacggccagctggcggggccgcgcgccggcgtctccaagcgacacctgcggggcgaccagatcacgtggatcgggggcaacgaggagggctgcgaggccatcagcttcctcctgtccctcatcgacaggctggtcctctactgcgggagccggctgggcaaatactacgtcaaggagaggtctaaggcaatggtggcttgctatccgggaaatggaacaggttatgttcgccacgtggacaaccccaacggtgatggtcgctgcatcacctgcatctactatctgaacaagaattgggatgccaagctacatggtgggatcctgcggatatttccagaggggaaatcattcatagcagatgtggagcccatttttgacagactcctgttcttctggtcagatcgtaggaacccacacgaagtgcagccctcttacgcaaccagatatgctatgactgtctggtactttgatgctgaagaaagggcagaagccaaaaagaaattcaggaatttaacta

SEQ ID NO: 42 - DNA, 941 bp, Homo sapiens
atgctgttagcctgagactcaggaagacaacttctgcagggtcactccctggcttctggaggaaagagaaggagggcagtgctccagtggtacagaagtgagacataatggaatcaggcttcacctccaaggacacctatctaagccattttaaccctcgggattacctagaaaaatattacaagtttggttctaggcactctgcagaaagccagattcttaagcaccttctgaaaaatcttttcaagatattctgcctagacggtgtgaagggagacctgctgattgacatcggctctggccccactatctatcagctcctctctgcttgtgaatcctttaaggagatcgtcgtcactgactactcagaccagaacctgcaggagctggagaagtggctgaagaaagagccagaggcctttgactggtccccagtggtgacctatgtgtgtgatcttgaagggaacagagtcaagggtccagagaaggaggagaagttgagacaggcggtcaagcaggtgctgaagtgtgatgtgactcagagccagccactgggggccgtccccttacccccggctgactgcgtgctcagcacactgtgtctggatgccgcctgcccagacctccccacctactgcagggcgctcaggaacctcggcagcctactgaagccagggggcttcctggtgatcatggatgcgctcaagagcagctactacatgattggtgagcagaagttctccagcctccccctgggccgggaggcagtagaggctgctgtgaaagaggctggctacacaatcgaatggtttgaggtgatctcgcaaagttattcttccaccatggccaacaacgaaggacttttctccctggtggcgaggaagctgagcagacccctgtgatgcctgtgacctcaattaaagcaattcctttgacctgtc

SEQ ID NO: 43 - DNA, 778 bp, Homo sapiens
aagggtcttctgagctgcagtggcaattagaccagaagatccccgctcctgtctctaaagaggggaaagggcaaggatggtggaggctttctgtgctacctggaagctgaccaacagtcagaactttgatgagtacatgaaggctctaggcgtgggctttgccactaggcaggtgggaaatgtgaccaaaccaacggtaattatcagtcaagaaggagacaaagtggtcatcaggactctcagcacattcaagaacacggagattagtttccagctgggagaagagtttgatgaaaccactgcagatgatagaaactgtaagtctgttgttagcctggatggagacaaacttgttcacatacagaaatgggatggcaaagaaacaaattttgtaagagaaattaaggatggcaaaatggttatgacccttacttttggtgatgtggttgctgttcgccactatgagaaggcataaaaatgttcctggtcggggcttggaagagctcttcagtttttctgtttcctcaagtctcagtgctatcctattacaacatggctgatcattaattagaaggttatccttggtgtggaggtggaaaatggtgatttaaaaacttgttactccaagcaacttgcccaattttaatctgaaaatttatcatgttttataatttgaattaaagttttgtccccccccccttttttttataaacaagtgaatacattttataatttcttttggaatgtaaatcaaatttgaataaaaatcttacacgtg

SEQ ID NO: 44 - DNA, 1669 bp, Homo sapiens
cttccaggactgagaaaggggaaagggaagggtgccacgtccgagcagccgccttgactggggaagggtctgaatcccacccttggcattgcttggtggagactgagatacccgtgctccgctcgcctccttggttgaagatttctccttccctcacgtgatttgagccccgtttttattttctgtgagccacgtcctcctcgagcggggtcaatctggcaaaaggagtgatgcgcttcgcctggaccgtgctcctgctcgggcctttgcagctctgcgcgctagtgcactgcgcccctcccgccgccggccaacagcagcccccgcgcgagccgccggcggctccgggcgcctggcgccagcagatccaatgggagaacaacgggcaggtgttcagcttgctgagcctgggctcacagtaccagcctcagcgccgccgggacccgggcgccgccgtccctggtgcagccaacgcctccgcccagcagccccgcactccgatcctgctgatccgcgacaaccgcaccgccgcggcgcgaacgcggacggccggctcatctggagtcaccgctggccgccccaggcccaccgcccgtcactggttccaagctggctactcgacatctagagcccgcgaagctggcgcctcgcgcgcggagaaccagacagcgccgggagaagttcctgcgctcagtaacctgcggccgcccagccgcgtggacggcatggtgggcgacgacccttacaacccctacaagtactctgacgacaacccttattacaactactacgatacttatgaaaggcccagacctgggggcaggtaccggcccggatacggcactggctacttccagtacggtctcccagacctggtggccgacccctactacatccaggcgtccacgtacgtgcagaagatgtccatgtacaacctgagatgcgcggcggaggaaaactgtctggccagtacagcatacagggcagatgtcagagattatgatcacagggtgctgctcagatttccccaaagagtgaaaaaccaagggacatcagatttcttacccagccgaccaagatattcctgggaatggcacagttgtcatcaacattaccacagtatggatgagtttagccactatgacctgcttgatgccaacacccagaggagagtggctgaaggccacaaagcaagtttctgtcttgaagacacatcctgtgactatggctaccacaggcgatttgcatgtactgcacacacacagggattgagtcctggctgttatgatacctatggtgcagacatagactgccagtggattgatattacagatgtaaaacctggaaactatatcctaaaggtcagtgtaaaccccagctacctggttcctgaatctgactataccaacaatgttgtgcgctgtgacattcgctacacaggacatcatgcgtatgcctcaggctgcacaatttcaccgtattagaaggcaaagcaaaactcccaatggataaatcagtgcctggtgttctgaagtgggaaaaaatagactaacttcagtaggatttatgtattttgaaaaagagaacagaaaacaacaaaagaatttttgtttggactgttttcaataacaaagcacataactggattttgaacgcttaagtcatcatt

SEQ ID NO: 45 - DNA, 1821 bp, Homo sapiens
gcggatcctcacacgactgtgatccgattctttccagcggcttctgcaaccaagcgggtcttacccccggtcctccgcgtctccagtcctcgcacctggaaccccaacgtccccgagagtccccgaatccccgctcccaggctacctaagaggatgagcggtgctccgacggccggggcagccctgatgctctgcgccgccaccgccgtgctactgagcgctcagggcggacccgtgcagtccaagtcgccgcgctttgcgtcctgggacgagatgaatgtcctggcgcacggactcctgcagctcggccaggggctgcgcgaacacgcggagcgcacccgcagtcagctgagcgcgctggagcggcgcctgagcgcgtgcgggtccgcctgtcagggaaccgaggggtccaccgacctcccgttagcccctgagagccgggtggaccctgaggtccttcacagcctgcagacacaactcaaggctcagaacagcaggatccagcaactcttccacaaggtggcccagcagcagcggcacctggagaagcagcacctgcgaattcagcatctgcaaagccagtttggcctcctggaccacaagcacctagaccatgaggtggccaagcctgcccgaagaaagaggctgcccgagatggcccagccagttgacccggctcacaatgtcagccgcctgcaccggctgcccagggattgccaggagctgttccaggttggggagaggcagagtggactatttgaaatccagcctcaggggtctccgccatttttggtgaactgcaagatgacctcagatggaggctggacagtaattcagaggcgccacgatggctcagtggacttcaaccggccctgggaagcctacaaggcggggtttggggatccccacggcgagttctggctgggtctggagaaggtgcatagcatcacgggggaccgcaacagccgcctggccgtgcagctgcgggactgggatggcaacgccgagttgctgcagttctccgtgcacctgggtggcgaggacacggcctatagcctgcagctcactgcacccgtggccggccagctgggcgccaccaccgtcccacccagcggcctctccgtacccttctccacttgggaccaggatcacgacctccgcagggacaagaactgcgccaagagcctctctggaggctggtggtttggcacctgcagccattccaacctcaacggccagtacttccgctccatcccacagcagcggcagaagcttaagaagggaatcttctggaagacctggcggggccgctactacccgctgcaggccaccaccatgttgatccagcccatggcagcagaggcagcctcctagcgtcctggctgggcctggtcccaggcccacgaaagacggtgactcttggctctgcccgaggatgtggccaagaccacgactggagaagccccctttctgagtgcaggggggctgcatgcgttgcctcctgagatcgaggctgcaggatatgctcagactctagaggcgtggaccaaggggcatggagcttcactccttgctggccagggagttggggactcagagggaccacttggggccagccagactggcctcaatggcggactcagtcacattgactgacggggaccagggcttgtgtgggtcgagagcgccctcatggtgctggtgctgttgtgtgtaggtcccctggggacacaagcaggcgccaatggtatctgggcggagctcacagagttcttggaataaaagcaacctcagaacataaaaaaaaaaaaaaaagatggc

SEQ ID NO: 46 - DNA, 996 bp, Homo sapiens
gaattagcagcaaaagtggttcagatgttttatgtggctgagccaaagcaagtgccccatattctctgtagtccttctatgaagaatattaatcctttaactgccatgagctatctaaggaagctggatacttctgggttttcatcgatcttagtgacattgaccaaggcagcagtggctctgaaaatgggagatcttgacatgcacagaaatgaaatgaaaagccattcagagagaaagggacagattgttccaaccgagcttgcacttcacttgaaggaaactcagcctggattgcttgtggcttcagttctgggcttgcagaagaacaacaaaattggaattgaagaagcagattccttttttaagcccagctgtcgctttatcagtgctatatttatctggaatatagaggctccttttactgtttttaaggtgctttgtgctaaggatgaagatacaattcctcagctcttggtagacttttgggaagctcagctagtggcatgtctcccagatgtggtacttcaggaactctttttcaaactcacatcacagtacatctggagattgtctaagaggcagcctcctgacaccacaccattgcgaacatcggaggatctgataaatgcctgtagtcattatggcttaatttatccatgggttcacgtcgtaatatcatctgattctttagctgataaaaattatacagaagatctttcaaaattacagtctcttatatgtggtccttcatttgacatagcttccattattccgttcttggagccactttcagaagacactattgccggcctcagtgtccatgttctgtgtcgtacacgcttgaaagagtatgaacagtgcatagacatactgttagagagatgcccggaggcagtcattccatatgctaatcatgaactgaaagaagagaaccggtcgaaagaaaccattgacttaaaggtatcatttgaaaaataccataatggcatttga

SEQ ID NO: 47 - DNA, 781 bp, Homo sapiens
aaggaacaacagtgcttttatgacatcatctgattttgcagaacgagcagccggtgtgtaccacagagaagcacggtctggcaaatacaagctcacctacgcagaagctaaggcggtgtgtgaatttgaaggcggccatctcgcaacttacaagcagctagaggcagccagaaaaattggatttcatgtctgtgctgctggatggatggctaagggcagagttggataccccattgtgaagccagggcccaactgtggatttggaaaaactggcattattgattatggaatccgtctcaataggagtgaaagatgggatgcctattgctacaacccacacgcaaaggagtgtggtggcgtctttacagatccaaagcaaatttttaaatctccaggcttcccaaatgagtacgaagataaccaaatctgctactggcacattagactcaagtatggtcagcgtattcacctgagttttttagattttgaccttgaagatgacccaggttgcttggctgattatgttgaaatatatgacagttacgatgatgtccatggctttgtgggaagatactgtggagatgagcttccagatgacatcatcagtacaggaaatgtcatgaccttgaagtttctaagtgatgcttcagtgacagctggaggtttccaaatcaaatatgttgcaatggatcctgtatccaaatccagtcaaggaaaaaatacaagtactacttctactggaaataaaaactttttagctggaagatttagccacttataa

SEQ ID NO: 48 - DNA, 876 bp, Homo sapiens
atgcagcgggcgcgacccacgctctgggccgctgcgctgactctgctggtgctgctccgcgggccgccggtggcgcgggctggcgcgagctcggcgggcttgggtcccgtggtgcgctgcgagccgtgcgacgcgcgtgcactggcccagtgcgcgcctccgcccgccgtgtgcgcggagctggtgcgcgagccgggctgcggctgctgcctgacgtgcgcactgagcgagggccagccgtgcggcatctacaccgagcgctgtggctccggccttcgctgccagccgtcgcccgacgaggcgcgaccgctgcaggcgctgctggacggccgcgggctctgcgtcaacgctagtgccgtcagccgcctgcgcgcctacctgctgccagcgccgccagctccaggaaatgctagtgagtcggaggaagaccgcagcgccggcagtgtggagagcccgtccgtctccagcacgcaccgggtgtctgatcccaagttccaccccctccattcaaagataatcatcatcaagaaagggcatgctaaagacagccagcgctacaaagttgactacgagtctcagagcacagatacccagaacttctcctccgagtccaagcgggagacagaatatggtccctgccgtagagaaatggaagacacactgaatcacctgaagttcctcaatgtgctgagtcccaggggtgtacacattcccaactgtgacaagaagggattttataagaaaaagcagtgtcgcccttccaaaggcaggaagcggggcttctgctggtgtgtggataagtatgggcagcctctcccaggctacaccaccaaggggaaggaggacgtgcactgctacagcatgcagagcaagtag

SEQ ID NO: 49 - DNA, 701 bp, Homo sapiens
aaacatgtggaattcattcaaaatacatgagagctatgtatcctaccaaaaccttcccaaatcattacaccattgtcacgatgtggctgacagcaatgtatcaaggtttaaaagccgctacctacttttggcccggatcagaagtggctataaatggctcctttccttccatatacatgccttacaacggacccaggttttataccatgtattttgaagaacctgattcctctggacatgcaggtggaccagtcagtgccagagctatctttctggcacatggacccagttttaaagagaagactgaagttgaaccatttgaaaatattgaagtctataacctaatgtgtgatcttctacgcattcaaccagcaccaaacaatggaacccatggtagtttaaaccatcttctgaaggtgcctttttatgagccatcccatgcagaggaggtgtcaaagttttctgtttgtggctttgctaatccattgcccacagagtctcttgactgtttctgccctcacctacaaaatgaaggtaaaccagaagctctttgggttgaagaaagatttacagctcacattgcccgggtccgtgatgtagaacttctcactgggcttgacttctatcaggataaagtgcagcctgtctctgaaattttgcaactaaagacatatttaccaacatttgaaaccactatttaa

SEQ ID NO: 50 - DNA, 909 bp, Homo sapiens
attattgtacagagccccaaaaatcgaaacagaggaaacgaacagcagttgaacatggacgaaggaattcctcatttgcaagagagacagttactggaacatagagattttataggactggactattcctctttgtatatgtgtaaacccaaaaggagcatgaaacgagacgacaccaagactctgggacatctggagaaagctgtagtcttggaattaactttgaaacacttaaaagctttaaccgccttaaccgagcaacagcatcagaagataattgctttacagaatggggagcgatctctgaaatcgcccattcagtccgacttggatgcgttccactcgggatttcaaacatgcgccaaagaagtcttgcaatacctctcccggtttgagagctggacacccagggagccgcggtgtgtccagctgatcaaccacttgcacgccgtggccacccagttcttgcccaccccgcagctgttgactcaacaggtccctctgagcaaaggcaccggcgctccctcggccgccgggtccgcggccgccccctgcctggagcgcgcggggcagaagctggagcccctcgcctactgcgtgcccgtcatccagcggactcagcccagcgccgagctcgccgccgagaacgacacggacaccgacagcggctacggcggcgaagccgaggcccggccggaccgcgagaaaggcaaaggcgcgggggcgagccgcaaggcgggcgccgccgccgcgaccctcctgccgcacgaggtggcgccccttggggcgccgcacccccagcacccgcacggccgcacccacctgcccttcgccgggccccgcgagccggggaacccggagagctctgctcaggaagatccctcgcagccaggaaaggaagctccctga

SEQ ID NO: 51 - DNA, 5524 bp, Homo sapiens
ggcgatcacgttttcacatgatgtcacgctcagggcgcttcaattatccctccccacaaagataggtggcgcgtgtttcagggtctctcgtctctctcctccagaaaagaaaaagaaaaaaatgtcatagaagaggcgtaacacgtcagtccgtccccaggtttgtgtttcctggagtggccgaaagagatcagttctaacctgctctgcaggaataacggtcctgcctcccgacactcttggcgaggtttttgtacagtttgctccgggagctgtttcttcgcttccacctttttctcccccacacttcgcggcttcttcatgctttttcttctcaccatttctggccaaaactacaaacaagacttcgcagatcgagcctgcgtgctgccgaagcagggcgccgagtccatgcgaactgccatctgatccgctcttatcaatgaagcagccgatcatggcggatggcccccggtgcaagaggcgcaaacaagccaatcccaggaggaaaaacgtggtgaactatgacaatgtagtggacacaggttctgaaacagatgaggaagacaagcttcatattgctgaggatgacggtattgccaaccctctggaccaggagacgagtccagctagtgtgcccaaccatgagtcctccccacacgtgagccaagctctgttgccaagagaggaagaggaagatgaaataagggagggtggagtggaacacccctggcacaacaacgagattctacaagcctctgtagatggtccagaagaaatgaaggaagactatgacactatggggccagaagccacgatccagaccgcaattaacaatggtacagtgaagaatgcaaattgcacatcagattttgaggaatactttgccaaaagaaaactggaggaacgcgatggtcatgcagtcagcatcgaggagtaccttcagcgcagtgacacagccattatttacccagaagcccctgaggagctgtctcgccttggcacgccagaggccaatgggcaagaagaaaatgacctgccacctggaactccagatgcttttgcccaactgctgacctgcccctactgcgaccggggctacaagcgcttgacatcactgaaggagcacatcaagtaccgccacgagaagaatgaagagaacttttcctgccctctctgtagctacacgtttgcctaccgcacccagctcgagcggcatatggtgacacacaagccagggacagatcagcaccaaatgctaacccaaggagcaggtaatcgcaagttcaaatgcacagagtgtggcaaggccttcaaatataaacaccatctgaaagaacacctgcgaattcacagtggtgaaaaaccttacgagtgcccaaactgcaagaaacgtttctcccattctggttcctacagttcgcacatcagcagcaagaaatgtattggtttaatctctgtaaatggccgaatgagaaacaatatcaagacgggttcttcccctaattctgtttcttcttctcctactaattcagccattacccagttaagaaacaagttggagaatggaaaaccacttagtatgtctgaacagacaggcttacttaaaattaaaacagaaccactagacttcaatgactataaagttcttatggctacacacgggtttagtggcactagtccctttatgaatggtgggcttggagccaccagccctttaggagttcatccatctgctcagagtccaatgcagcacttaggtgtagggatggaagcccctttacttgggtttcccaccatgaatagtaatttaagtgaggtacaaaaaaggttctacaggattgtggacaatactgtttccaggcaaaaaaatggactgcaaggctgaagaaatttcaaagttgaaaggttatcacatgaaggatccatgctctcaacctgaggaacaaggagttacttctcctaatattccgcctgtcggtcttccggtagtgagtcataatggtgccactaaaagtattattgactatacgttggaaaaagtcaatgaagccaaagcttgcctccagagcttgactactgactcaaggagacagatcagtaatataaagaaagagaagctacgtactttaatagatttggtcactgatgacaaaatgattgagaaccacaacatatccactccattttcatgccagttctgtaaagaaagttttcctggccccatccctttgcatcagcatgaacgttacctttgtaagatgaatgaagagatcaaggcggtcctgcagcctcatgaaaacatagtccccaacaaagccggagtttttgttgataataaagccctcctcttgtcatctgtactttctgagaaaggaatgacaagccccatcaacccatacaaggaccacatgtctgtactcaaagcatactatgctatgaacatggagcccaactccgatgaactgctgaaaatttccattgctgtgggccttcctcaggaatttgtgaaggaatggtttgaacaacgaaaagtctaccagtactcaaattccaggtccccatccctggaaagaagctccaagccgttagctcccaacagtaaccctcccacaaaagactctttattacccaggtctcctgtaaaacctatggactccataacatcaccatctatagcagaactccacaacagtgttacgaattgtgatcctcctctcaggctaacaaaaccttcccattttaccaatattaaaccagttgaaaaattggaccactccaggagtaatactccttctcccttaaatctttcctccacatcttctaaaaactcccacagtagttcatacactccaaacagcttctcttgctgaggagctcccaggctgagcctttagacttgtcattaccaaaacaaatgaaagaacccaaaagtattatagccacaaagaacaaaacaaaagctagtagcatcagtttagatcataacagtgtttcttcctcatctgaaaactcagatgagcctctgaacttgacttttatcaagaaggaatttacaaattcaaataatctggacaacaaagcactaacccagtgttcagcatgaacccatttagtgccaaacctttatacacagctcttccacctcaagcgcatttccccctgctactttcatgccaccagtccagaccagtattcctgggctacgaccatacccaggactggatcagatgagcttcctaccacatatggcctacacctacccaactggagcagctacttttgctgatatgcagcaaaggagaaagtaccagcggaaacaaggatttcagggagaattgcttgatggagcacaagactacatgtcaggcctagatgatatgacagactccgactcctgtctgtctcgcaaaaagatcaagaagacagagagtggcatgtatgcatgtgacttatgtgacaagacattccagaaaagcagttcccttctgcgacataaatacgaacacacaggaaaaagaccacatcagtgtcagatttgtaagaaagcgtttaaacacaagcaccaccttatcgagcactcaaggcttcactcgggcgagaagccctatcagtgtgataaatgtggcaagcgcttctcacactcgggctcgtactcgcagcacatgaatcacaggtattcctactgcaagcgggaggcggaggagcgggaagcggcggagcgcgaggcgcgcgagaaagggcacttggaacccaccgagctgctgatgaaccgggcttacttgcagagcattacccctcaggggtactctgactcggaggagagggagagtatgccgagggatggcgagagcgagaaggagcacgagaaagaaggcgaggatggctacgggaagctgggcagacaggatggcgacgaggagttcgaggaggaagaggaagaaagtgaaaataaaagtatggatacggatcccgaaacgatacgagatgaagaagagactggagatcactccatggacgatagttcggaggatgggaaaatggaaaccaaatcagaccacgaggaagacaatatggaagatggcatgtaataaactactgcattttaagcttcctatttttttttccagtagtattgttacctgcttgaaaacactgctgtgttaagcggttcatgcacatgcctgacgcttccagaaagctgtggagagggacagaaggggtggttcagccaagacagatgtagacagagttggagctgggtattgttaaaaactgcattatgcaaaaattttgtacagtgttaaggcctaaaaactgtgtggttcagagactaattcctgtgtttaatagcatttatactttaagcacaactagaaaattgtaagaattgcactctacttatgtatcactacaaactttaaaaaactatgtctaatttatattaatacattttaaaaaggtgcccgcactaccatacatcagtatttttattattattattgttattcctttttaatttaatgtgctcgcactacaatgcatcagtattatgattcctctgtactttcctttcgctattcatcaatttcccattttttttttcagcttaagtaaccacacaattttaggcctcaatttttttttttttctgtgaaggaacttgaagtgatgcatgtgtgaatttaagataccgaagtcttaaagtgacctggacgtgaaggaaaaagtaagatgagaaataaagaaagcctttgtaaggtggttttaaaagccttatatgcaaaccttttaatctgtgtttctgcaagtgccatccttgtacagtgttaagagggtaacatgggttacctttgcaccagcttcagtgttaagctcaccctgttctttgaagcacccatgtcagtattagaagaataggcagcagttccttagtttacatatgtttgtgcaattattttctgtacttttttgttcattaattttgtcagtattacaccaaactgtttttgcaacaaaaaaattttttttgcattcatttaattttaggtcaaataacattttatttatgtggctcattttatatttcctaattttatttatttcatactgtagtgtacagtattatagttcttcaatatatagatatattttagtaaaaaaggaacatgacgttgatcatttgggcaaattttacgtaaagagaagagcatttattgtgttttggaacattaattgtgagatgggatttttcaattttattattttatttttgtttttttccaattactggaaattccaaatttgggaacttttgatacgatcttgtgaaaacactgtattttcgactgaaaattccactttcttcatcttgttttttagctaaaaagagggactgttaaatacaatgtatgataccatgacaaaaatctttcctgaattgtctttgtaaaagtattattgaattttcaatttgtaatttcttttgaaaatgaccatgctcgaataaaaatgtagccaaact

SEQ ID NO: 52 - DNA, 8178 bp, Homo sapiens
atgattcctgccagatttgccggggtgctgcttgctctggccctcattttgccagggccatctggagtgacacctttccgggaatcagcagggaccctttgtgcagaaggaactcgcggcaggtcatccacggcccgatgcagccttttcggaagtgacttcgtcaacacctttgatgggagcatgtacagctttgcgggatactgcagttacctcctggcagggggctgccagaaacgctccttctcgattattggggacttccagaatggcaagagagtgagcctctccgtgtatcttggggaattttttgacatccatttgtttgtcaatggtaccgtgacacagggggaccaaagagtctccatgccctatgcctccaaagggctgtatctagaaactgaggctgggtactacaagctgtccggtgaggcctatggctttgtggccaggatcgatggcagcggcaactttcaagtcctgctgtcagacagatacttcaacaagacctgcgggctgtgtggcaactttaacatctttgctgaagatgactttatgacccaagaagggaccttgacctcggacccttatgactttgccaactcatgggctctgagcagtggagaacagtggtgtgaacgggcatctcctcccagcagctcatgcaacatctcctctggggaaatgcagaagggcctgtgggagcagtgccagcttctgaagagcacctcggtgtttgcccgctgccaccctctggtggaccccgagccttttgtggccctgtgtgagaagactttgtgtgagtgtgctggggggctggagtgcgcctgccctgccctcctggagtacgcccggacctgtgcccaggagggaatggtgctgtacggctggaccgaccacagcgcgtgcagcccagtgtgccctgctggtatggagtataggcagtgtgtgtccccttgcgccaggacctgccagagcctgcacatcaatgaaatgtgtcaggagcgatgcgtggatggctgcagctgccctgagggacagctcctggatgaaggcctctgcgtggagagcaccgagtgtccctgcgtgcattccggaaagcgctaccctcccggcacctccctctctcgagactgcaacacctgcatttgccgaaacagccagtggatctgcagcaatgaagaatgtccaggggagtgccttgtcacaggtcaatcacacttcaagagctttgacaacagatacttcaccttcagtgggatctgccagtacctgctggcccgggattgccaggaccactccttctccattgtcattgagactgtccagtgtgctgatgaccgcgacgctgtgtgcacccgctccgtcaccgtccggctgcctggcctgcacaacagccttgtgaaactgaagcatggggcaggagttgccatggatggccaggacgtccagctccccctcctgaaaggtgacctccgcatccagcgtacagtgacggcctccgtgcgcctcagctacggggaggacctgcagatggactgggatggccgcgggaggctgctggtgaagctgtcccccgtctatgccgggaagacctgcggcctgtgtgggaattacaatggcaaccagggcgacgacttccttaccccctctgggctggcggagccccgggtggaggacttcgggaacgcctggaagctgcacggggactgccaggacctgcagaagcagcacagcgatccctgcgccctcaacccgcgcatgaccaggttctccgaggaggcgtgcgcggtcctgacgtcccccacattcgaggcctgccatcgtgccgtcagcccgctgccctacctgcggaactgccgctacgacgtgtgctcctgctcggacggccgcgagtgcctgtgcggcgccctggccagctatgccgcggcctgcgcggggagaggcgtgcgcgtcgcgtggcgcgagccaggccgctgtgagctgaactgcccgaaaggccaggtgtacctgcagtgcgggaccccctgcaacctgacctgccgctctctctcttacccggatgaggaatgcaatgaggcctgcctggagggctgcttctgccccccagggctctacatggatgagaggggggactgcgtgcccaaggcccagtgcccctgttactatgacggtgagatcttccagccagaagacatcttctcagaccatcacaccatgtgctactgtgaggatggcttcatgcactgtaccatgagtggagtccccggaagcttgctgcctgacgctgtcctcagcagtcccctgtctcatcgcagcaaaaggagcctatcctgtcggccccccatggtcaagctggtgtgtcccgctgacaacctgcgggctgaagggctcgagtgtgccaaaacgtgccagaactatgacctggagtgcatgagcatgggctgtgtctctggctgcctctgccccccgggcatggtccggcatgagaacagatgtgtggccctggaaaggtgtccctgcttccatcagggcaaggagtatgcccctggagaaacagtgaagattggctgcaacacttgtgtctgtcgggaccggaagtggaactgcacagaccatgtgtgtgatgccacgtgctccacgatcggcatggcccactacctcaccttcgacgggctcaaatacctgttccccggggagtgccagtacgttctggtgcaggattactgcggcagtaaccctgggacctttcggatcctagtggggaataagggatgcagccacccctcagtgaaatgcaagaaacgggtcaccatcctggtggagggaggagagattgagctgtttgacggggaggtgaatgtgaagaggcccatgaaggatgagactcactttgaggtggtggagtctggccgatacatcattctgctgctgggcaaagccctctccgtggtctgggaccgccacctgagcatctccgtggtcctgaagcagacataccaggagaaagtgtgtggcctgtgtgggaattttgatggcatccagaacagtgacctcaccagcagcaacctccaagtggaggaagaccctgtggactttgggaactcctggaaagtgcctctggactcatcccctgccacctgccataacaacatcatgaagcagacgatggtggattcctcctgtagaatccttaccagtgacgtcttccaggactgcaacaagctggtggaccccgagccatatctggatgtctgcatttacgacacctgctcctgtgagtccattggggactgcgcctgcttctgcgacaccattgctgcctatgcccacgtgtgtgcccagcatggcaaggtggtgacctggaggacggccacattgtgccggaaaatcctggatgagcttttgcagacctgcgttgaccctgaagactgcccggtgtgtgaggtggctggctggcgttttgcctcaagaaagaaagtcaccttgaatcccagtgaccctgagcactgccagatttgccactgtgatgttgtcaacctcacctgtgaagcctgccaggagccgggaggcctggtggtgcctcccacagatgccccggtgagccccaccactctgtatgtggaggacatctcggaaccgccgttgcacgatttctactgcagcaggctactggacctggtcttcctgctggatggctcctccaggctgtccgaggctgagtttgaagtgctgaaggcctttgtggtggacatgatggagcggctgcgcatctcccagaagtgggtccgcgtggccgtggtggagtaccacgacggctcccacgcctacatcgggctcaaggaccggaagcgaccgtcagagctgcggcgcgttgccagccaggtgaagtatgcgggcagccaggtggcctccaccagcgaggccttgaaatacacactgttccaaatcatcagcaagatcgaccgccctgaagccttctgcatcgccctgctcctgatggccagccaggagccccaacggatgtcccggaactttgtccgctacgtccagggcctgaagaagaagaaggtcatcgtgatcccggttggcattgggccccatgccaacctcaagcagatccgcctcattgagaagcaggcccctgagaacaaggccttcgtgctgagcggtgtggatgagctggagcagcaaagggaagagatcgttagctacctctgtgaccttgcccctgaagcccctcctcctactctgcccccccacatggcacaagtcactgtgggcccggggctcttggggctttcgaccctggggcccaagaggaactccatggttctggatgtggcgtttgtcccggaaggattggacaaaattggtgaagccgacttcaacaggagcaaggagttcatggaggaggtgattcagcggatggatgtgggccaggacagcatccacgtcacggtgctgcagtactcctacatggtgaccgtggagtaccccttcagcgaggcacagtccaaaggggacatcctgcagcgggtgcgagagatccgctaccagggcggcaacaggaccaacactgggctggccctgcggtacctctctgaccacagcttcttggtcagccagggtgaccgggagcaggcgcccaacctggtctacatggtcaccggaaatcctgcctctgatgagatcaagaggctgcctggagacatccaggtggtgcccattggagtgggccctaatgccaacgtgcaggagctggagaggattggctggcccaatgcccccatcctcatccaggactttgagacgctcccccgagaggctcctgacctggtgctgcagaggtgctgctccggagaggggctgcagatccccaccctctcccctgcccctgactgcagccagcccctggacgtgatccttctcctggatggctcctccagtttcccagcttcttattttgatgaaatgaagagttttgctaaggctttcatttcaaaagccaatatagggcctcatctcactcaggggtcagtgctccagtatggaagcatcaccaccattgacgtgccatggaacgtggccccggagaaagcccatttgctgagccttgtggacgtcatgcagcgggagggaggccccagccaaatcggggatgccttgggctttgctgtgcgatacttgacttcagaaatgcatggtgccaggccgggagcctcaaaggcggtggtcatcctggtcacggacgtctctgtggattcagtggatgcagcagctgatgccgccaggtccaacagagtgacagtgttccctattggaattggagatcgctacgatgcagcccagctacggatcttggcaggcccagcaggcgactccaacgtggtgaagctccagcgaatcgaagacctccctaccatggtcaccttgggcaattccttcctccacaaactgtgctctggatttgttaggattcgcatggatgaggatgggaatgagaagaggcccggggacgtctggaccttgccagaccagtgccacaccgtgacttgccagccagatggccagaccttgctgaagagtcatcgggtcaactgtgaccgggggctgaggccttcatgccctaacagccagtcccctgttaaagtggaagacacctgtggctgccgctggacctgcccctgtgtgtgcacaggcagctccactcggcacatcgtgacctttgatgggcagaatttcaagctgactggcagctgttcttatgtcctatttcaaaacaaggagcaggacctggaggtgattctccataatggtgcctgcagccctggagcaaggcagggctgcatgaaatccatcgaggtgaagcacagtgccctctccgtcgagctgcacagtgacatggaggtgacggtgaatgggagactggtctctgttccttacgtgggtgggaacatggaagtcaacgtttatggtgccatcatgcatgaggtcagattcaatcaccttggtcacatcttcacattcactccacaaaacaatgagttccaactgcagctcagccccaagacttttgcttcaaagacgtatggtctgtgtgggatctgtgatgagaacggagccaatgacttcatgctgagggatggcacagtcaccacagactggaaaacacttgttcaggaatggactgtgcagcggccagggcagacgtgccagcccatcctggaggagcagtgtcttgtccccgacagctcccactgccaggtcctcctcttaccactgtttgctgaatgccacaaggtcctggctccagccacattctatgccatctgccagcaggacagttgccaccaggagcaagtgtgtgaggtgatcgcctcttatgcccacctctgtcggaccaacggggtctgcgttgactggaggacacctgatttctgtgctatgtcatgcccaccatctctggtctacaaccactgtgagcatggctgtccccggcactgtgatggcaacgtgagctcctgtggggaccatccctccgaaggctgtttctgccctccagataaagtcatgttggaaggcagctgtgtccctgaagaggcctgcactcagtgcattggtgaggatggagtccagcaccagttcctggaagcctgggtcccggaccaccagccctgtcagatctgcacatgcctcagcgggcggaaggtcaactgcacaacgcagccctgccccacggccaaagctcccacgtgtggcctgtgtgaagtagcccgcctccgccagaatgcagaccagtgctgccccgagtatgagtgtgtgtgtgacccagtgagctgtgacctgcccccagtgcctcactgtgaacgtggcctccagcccacactgaccaaccctggcgagtgcagacccaacttcacctgcgcctgcaggaaggaggagtgcaaaagagtgtccccaccctcctgccccccgcaccgtttgcccacccttcggaagacccagtgctgtgatgagtatgagtgtgcctgcaactgtgtcaactccacagtgagctgtccccttgggtacttggcctcaaccgccaccaatgactgtggctgtaccacaaccacctgccttcccgacaaggtgtgtgtccaccgaagcaccatctaccctgtgggccagttctgggaggagggctgcgatgtgtgcacctgcaccgacatggaggatgccgtgatgggcctccgcgtggcccagtgctcccagaagccctgtgaggacagctgtcggtcggtcggctcccagtgggcctccccggagaacccctgcctcatcaatgagtgtgtccgagtgaaggaggaggtctttatacaacaaaggaacgtctcctgcccccagctggaggtccctgtctgcccctcgggctttcagctgagctgtaagacctcagcgtgctgcccaagctgtcgctgtgagcgcatggaggcctgcatgctcaatggcactgtcattgggcccgggaagactgtgatgatcgatgtgtgcacgacctgccgctgcatggtgcaggtgggggtcatctctggattcaagctggagtgcaggaagaccacctgcaacccctgccccctgggttacaaggaagaaaataacacaggtgaatgttgtgggagatgtttgcctacggcttgcaccattcagctaagaggaggacagatcatgacactgaagcgtgatgagacgctccaggatggctgtgatactcacttctgcaaggtcaatgagagaggagagtacttctgggagaagagggtcacaggctgcccaccctttgatgaacacaagtgtctggctgagggaggtaaaattatgaaaattccaggcacctgctgtgacacatgtgaggagcctgagtgcaacgacatcactgccaggctgcagtatgtcaaggtgggaagctgtaagtctgaagtagaggtggatatccactactgccagggcaaatgtgccagcaaagccatgtactccattgacatcaacgatgtgcaggaccagtgctcctgctgctctccgacacggacggagcccatgcaggtggccctgcactgcaccaatggctctgttgtgtaccatgaggttctcaatgccatggagtgcaaatgctcccccaggaagtgcagcaagtga

SEQ ID NO: 53 - DNA, 2422 bp, Homo sapiens
acccgcgctcgtacgtgcgcctccgccggcagctcctgactcatcgggggctccgggtcacatgcgcccgcgcggccctataggcgcctcctccgcccgccgcccgggagccgcagccgccgccgccactgccactcccgctctctcagcgccgccgtcgccaccgccaccgccaccgccactaccaccgtctgagtctgcagtcccgagatcccagccatcatgtccatagagaagatctgggcccgggagatcctggactcccgcgggaaccccacagtggaggtggatctctatactgccaaaggtcttttccgggctgcagtgcccagtggagcctctacgggcatctatgaggccctggagctgagggatggagacaaacagcgttacttaggcaaaggtgtcctgaaggcagtggaccacatcaactccaccatcgcgccagccctcatcagctcaggtctctctgtggtggagcaagagaaactggacaacctgatgctggagttggatgggactgagaacaaatccaagtttggggccaatgccatcctgggtgtgtctctggccgtgtgtaaggcaggggcagctgagcgggaactgcccctgtatcgccacattgctcagctggccgggaactcagacctcatcctgcctgtgccggccttcaacgtgatcaatggtggctctcatgctggcaacaagctggccatgcaggagttcatgatcctcccagtgggagctgagagctttcgggatgccatgcgactaggtgcagaggtctaccatacactcaagggagtcatcaaggacaaatacggcaaggatgccaccaatgtgggggatgaaggtggctttgcccccaatatcctggagaacagtgaagccttggagctggtgaaggaagccatcgacaaggctggctacacggaaaagatcgttattggcatggatgttgctgcctcagagttttatcgtgatggcaaatatgacttggacttcaagtctcccactgatccttcccgatacatcactggggaccagctgggggcactctaccaggactttgtcagggactatcctgtggtctccattgaggacccatttgaccaggatgattgggctgcctggtccaagttcacagccaatgtagggatccagattgtgggtgatgacctgacagtgaccaacccaaaacgtattgagcgggcagtggaagaaaaggcctgcaactgtctgctgctcaaggtcaaccagatcggctcggtcactgaagccatccaagcgtgcaagctggcccaggagaatggctggggggtcatggtgagtcatcgctcaggagagactgaggacacattcattgctgacctggtggtggggctgtgcacaggccagatcaagactggtgccccgtgccgttctgaacgtctggctaaatacaaccagctcatgagaattgaggaagagctgggggatgaagctcgctttgccggacataacttccgtaatcccagtgtgctgtgattcctctgcttgcctggagacgtggaacctctgtctcatcctcctggaaccttgctgtcctgatctgtgatagttcaccccctgagatcccctgagccccagggtgcccagaacttccctgattgacctgctccgctgctccttggcttacctgacctcttgctgtctctgctcgccctcctttctgtgccctactcattggggttccgcactttccacttcttcctttctctttctctcttccctcagaaactagaaatgtgaatgaggattattataaaagggggtccgtggaagaatgatcagcatctgtgatgggagcgtcagggttggtgtgctgaggtgttagagagggaccatgtgtcacttgtgctttgctcttgtcccacgtgtcttccactttgcatatgagccgtgaactgtgcatagtgctgggatggaggggagtgttgggcatgtgatcacgcctggctaataaggctttagtgtatttatttatttatttattttatttgtttttcattcatcccattaatcatttccccataactcaatggcctaaaactggcctgacttgggggaacgatgtgtctgtatttcatgtggctgtagatcccaagatgactggggtgggaggtcttgctagaatgggaagggtcatagaaagggccttgacatcagttcctttgtgtgtactcactgaagcctgcgttggtccagagcggaggctgtgtgcctgggggagttttcctctatacatctctccccaaccctaggttccctgttcttcctccagctgcaccagagcaacctctcactccccatgccacgttccacagttgccaccacctctgtggcattgaaatgagcacctccattaaagtctgaatcagtg

SEQ ID NO: 54 - DNA, 6816 bp, Homo sapiens
atgcttaggggtccggggcccgggctgctgctgctggccgtcctgtgcctggggacagcggtgccctccacgggagcctcgaagagcaagaggcaggctcagcaaatggttcagccccagtccccggtggctgtcagtcaaagcaagcccggttgttatgacaatggaaaacactatcagataaatcaacagtgggagcggacctacctaggcaatgcgttggtttgtacttgttatggaggaagccgaggttttaactgcgagagtaaacctgaagctgaagagacttgctttgacaagtacactgggaacacttaccgagtgggtgacacttatgagcgtcctaaagactccatgatctgggactgtacctgcatcggggctgggcgagggagaataagctgtaccatcgcaaaccgctgccatgaagggggtcagtcctacaagattggtgacacctggaggagaccacatgagactggtggttacatgttagagtgtgtgtgtcttggtaatggaaaaggagaatggacctgcaagcccatagatagatgcaacgatcaggacacaaggacatcctatagaattggagacacctggagcaagaaggataatcgaggaaacctgctccagtgcatctgcacaggcaacggccgaggagagtggaagtgtgagaggcacacctctgtgcagaccacatcgagcggatctggccccttcaccgatgttcgtgcagctgtttaccaaccgcagcctcacccccagcctcctccctatggccactgtgtcacagacagtggtgtggtctactctgtggggatgcagtggctgaagacacaaggaaataagcaaatgctttgcacgtgcctgggcaacggagtcagctgccaagagacagctgtaacccagacttacggtggcaactcaaatggagagccatgtgtcttaccattcacctacaatggcaggacgttctactcctgcaccacagaagggcgacaggacggacatctttggtgcagcacaacttcgaattatgagcaggaccagaaatactctttctgcacagaccacactgttttggttcagactcgaggaggaaattccaatggtgccttgtgccacttccccttcctatacaacaaccacaattacactgattgcacttctgagggcagaagagacaacatgaagtggtgtgggaccacacagaactatgatgccgaccagaagtttgggttctgccccatggctgcccacgaggaaatctgcacaaccaatgaaggggtcatgtaccgcattggagatcagtgggataagcagcatgacatgggtcacatgatgaggtgcacgtgtgttgggaatggtcgtggggaatggacatgcattgcctactcgcagcttcgagatcagtgcattgttgatgacatcacttacaatgtgaacgacacattccacaagcgtcatgaagaggggcacatgctgaactgtacatgcttcggtcagggtcggggcaggtggaagtgtgatcccgtcgaccaatgccaggattcagagactgggacgttttatcaaattggagattcatgggagaagtatgtgcatggtgtcagataccagtgctactgctatggccgtggcattggggagtggcattgccaacctttacagacctatccaagctcaagtggtcctgtcgaagtatttatcactgagactccgagtcagcccaactcccaccccatccagtggaatgcaccacagccatctcacatttccaagtacattctcaggtggagacctaaaaattctgtaggccgttggaaggaagctaccataccaggccacttaaactcctacaccatcaaaggcctgaagcctggtgtggtatacgagggccagctcatcagcatccagcagtacggccaccaagaagtgactcgctttgacttcaccaccaccagcaccagcacacctgtgaccagcaacaccgtgacaggagagacgactcccttttctcctcttgtggccacttctgaatctgtgaccgaaatcacagccagtagctttgtggtctcctgggtctcagcttccgacaccgtgtcgggattccgggtggaatatgagctgagtgaggagggagatgagccacagtacctggatcttccaagcacagccacttctgtgaacatccctgacctgcttcctggccgaaaatacattgtaaatgtctatcagatatctgaggatggggagcagagtttgatcctgtctacttcacaaacaacagaactggatgctcccactaacctccagtttgtcaatgaaactgattctactgtcctggtgagatggactccacctcgggcccagataacaggataccgactgaccgtgggccttacccgaagaggccagcccaggcagtacaatgtgggtccctctgtctccaagtaccccctgaggaatctgcagcctgcatctgagtacaccgtatccctcgtggccataaagggcaaccaagagagccccaaagccactggagtctttaccacactgcagcctgggagctctattccaccttacaacaccgaggtgactgagaccaccattgtgatcacatggacgcctgctccaagaattggttttaagctgggtgtacgaccaagccagggaggagaggcaccacgagaagtgacttcagactcaggaagcatcgttgtgtccggcttgactccaggagtagaatacgtctacaccatccaagtcctgagagatggacaggaaagagatgcgccaattgtaaacaaagtggtgacaccattgtctccaccaacaaacttgcatctggaggcaaaccctgacactggagtgctcacagtctcctgggagaggagcaccaccccagacattactggttatagaattaccacaacccctacaaacggccagcagggaaattctttggaagaagtggtccatgctgatcagagctcctgcacttttgataacctgagtcccggcctggagtacaatgtcagtgtttacactgtcaaggatgacaaggaaagtgtccctatctctgataccatcatcccagaggtgccccaactcactgacctaagctttgttgatataaccgattcaagcatcggcctgaggtggaccccgctaaactcttccaccattattgggtaccgcatcacagtagttgcggcaggagaaggtatccctatttttgaagattttgtggactcctcagtaggatactacacagtcacagggctggagccgggcattgactatgatatcagcgttatcactctcattaatggcggcgagagtgcccctactacactgacacaacaaacggctgttcctcctcccactgacctgcgattcaccaacattggtccagacaccatgcgtgtcacctgggctccacccccatccattgatttaaccaacttcctggtgcgttactcacctgtgaaaaatgaggaagatgttgcagagttgtcaatttctccttcagacaatgcagtggtcttaacaaatctcctgcctggtacagaatatgtagtgagtgtctccagtgtctacgaacaacatgagagcacacctcttagaggaagacagaaaacaggtcttgattccccaactggcattgacttttctgatattactgccaactcttttactgtgcactggattgctcctcgagccaccatcactggctacaggatccgccatcatcccgagcacttcagtgggagacctcgagaagatcgggtgccccactctcggaattccatcaccctcaccaacctcactccaggcacagagtatgtggtcagcatcgttgctcttaatggcagagaggaaagtcccttattgattggccaacaatcaacagtttctgatgttccgagggacctggaagttgttgctgcgacccccaccagcctactgatcagctgggatgctcctgctgtcacagtgagatattacaggatcacttacggagaaacaggaggaaatagccctgtccaggagttcactgtgcctgggagcaagtctacagctaccatcagcggccttaaacctggagttgattataccatcactgtgtatgctgtcactggccgtggagacagccccgcaagcagcaagccaatttccattaattaccgaacagaaattgacaaaccatcccagatgcaagtgaccgatgttcaggacaacagcattagtgtcaagtggctgccttcaagttcccctgttactggttacagagtaaccaccactcccaaaaatggaccaggaccaacaaaaactaaaactgcaggtccagatcaaacagaaatgactattgaaggcttgcagcccacagtggagtatgtggttagtgtctatgctcagaatccaagcggagagagtcagcctctggttcagactgcagtaaccaacattgatcgccctaaaggactggcattcactgatgtggatgtcgattccatcaaaattgcttgggaaagcccacaggggcaagtttccaggtacagggtgacctactcgagccctgaggatggaatccatgagctattccctgcacctgatggtgaagaagacactgcagagctgcaaggcctcagaccgggttctgagtacacagtcagtgtggttgccttgcacgatgatatggagagccagcccctgattggaacccagtccacagctattcctgcaccaactgacctgaagttcactcaggtcacacccacaagcctgagcgcccagtggacaccacccaatgttcagctcactggatatcgagtgcgggtgacccccaaggagaagaccggaccaatgaaagaaatcaaccttgctcctgacagctcatccgtggttgtatcaggacttatggtggccaccaaatatgaagtgagtgtctatgctcttaaggacactttgacaagcagaccagctcagggtgttgtcaccactctggagaatgtcagcccaccaagaagggctcgtgtgacagatgctactgagaccaccatcaccattagctggagaaccaagactgagacgatcactggcttccaagttgatgccgttccagccaatggccagactccaatccagagaaccatcaagccagatgtcagaagctacaccatcacaggtttacaaccaggcactgactacaagatctacctgtacaccttgaatgacaatgctcggagctcccctgtggtcatcgacgcctccactgccattgatgcaccatccaacctgcgtttcctggccaccacacccaattccttgctggtatcatggcagccgccacgtgccaggattaccggctacatcatcaagtatgagaagcctgggtctcctcccagagaagtggtccctcggccccgccctggtgtcacagaggctactattactggcctggaaccgggaaccgaatatacaatttatgtcattgccctgaagaataatcagaagagcgagcccctgattggaaggaaaaagacagacgagcttccccaactggtaacccttccacaccccaatcttcatggaccagagatcttggatgttccttccacagttcaaaagacccctttcgtcacccaccctgggtatgacactggaaatggtattcagcttcctggcacttctggtcagcaacccagtgttgggcaacaaatgatctttgaggaacatggttttaggcggaccacaccgcccacaacggccacccccataaggcataggccaagaccatacccgccgaatgtaggtgaggaaatccaaattggtcacatccccagggaagatgtagactatcacctgtacccacacggtccgggactcaatccaaatgcctctacaggacaagaagctctctctcagacaaccatctcatgggccccattccaggacacttctgagtacatcatttcatgtcatcctgttggcactgatgaagaacccttacagttcagggttcctggaacttctaccagtgccactctgacaggcctcaccagaggtgccacctacaacatcatagtggaggcactgaaagaccagcagaggcataaggttcgggaagaggttgttaccgtgggcaactctgtcaacgaaggcttgaaccaacctacggatgactcgtgctttgacccctacacagtttcccattatgccgttggagatgagtgggaacgaatgtctgaatcaggctttaaactgttgtgccagtgcttaggctttggaagtggtcatttcagatgtgattcatctagatggtgccatgacaatggtgtgaactacaagattggagagaagtgggaccgtcagggagaaaatggccagatgatgagctgcacatgtcttgggaacggaaaaggagaattcaagtgtgaccctcatgaggcaacgtgttacgatgatgggaagacataccacgtaggagaacagtggcagaaggaatatctcggtgccatttgctcctgcacatgctttggaggccagcggggctggcgctgtgacaactgccgcagacctgggggtgaacccagtcccgaaggcactactggccagtcctacaaccagtattctcagagataccatcagagaacaaacactccctttgctctggaggaagttctccagcttcagctcaactcacagcttctccaagcatcaccctgggagtttcctgagggttttctcataaatgagggctgcacattgcctgttctgcttcgaagtattcaataccgctcagtattttaa

SEQ ID NO: 55 - DNA, 813 bp, Homo sapiens
gttgtgttgtcaacaacggtgaatgtggatggacacgtcctggctgtttctgacaacatgtttgttcataacaactccaagcatggacggagagcaagaagactcgatccatcggaagctaccccctgcatcaaagccattagcccgagtgaaggctggaccacaggaggagccatggtcatcatcatcggggacaacttctttgatggtctccaagtggtgtttgggactatgcttgtatggagcgaggagatgctgttgaaaagagctgcagatctagtggaagctctttatggcacaccacacaataaccaggacatcattttgaagcgagccgcagacattgctgaagctctctacagcgtccccaggaatcccagccagcttccagccctctctagctccccagcgcacagtggcatgatgggaatcaactcctatggcagccagcttggggtcagcatctcagagtcaacacaaggaaataatcaagggtacatccgcaacacaagcagcatctctccgcggggatactcttccagctccacgcctcaacagtctaattacagtacctccagcaacagtatgaatggctacagcaatgtccccatggccaacttgggtgttccaggttcaccaggatttctaaatggctcacccaccggctctccttatggaatttttcctgctgtcaaacagaagagtgcctttgcccctgtcatcaggccccaaggctccccttcacctgcctgctccagcggcaatggaaatggattcagagccatgaccggacttgttgtacccccgatgtaa

SEQ ID NO: 56 - DNA, 3953 bp, Homo sapiens
cagcgctggcgtcaatgctcccttcctcgggccattggagactccgttgctttttaatggcggcagcggctgctgggtgagcagctggaggccggacagtgttcgtcccatacggagaggatcgctttctcctggcgtcaccagcgctgggttggtgggggtagcttttccctctttgctcctccattcttgaagaaagaagaagatgccactgccatttgggttgaaactgaaacgcacccggcgctacacggtgtccagcaagagttgcctggttgcccggatccaactgcttaataacgagtttgtggagttcaccctgtccgtggagagcactggccaggaaagcctcgaggccgtggcccagaggctggagctgcgggaggtcacttacttcagcctctggtactacaacaagcaaaatcagcgccggtgggtagatttggaaaaacctttgaagaagcagctggataaatatgcattggaacctaccgtctattttggagtggtgttttatgtgccttcagtttctcagctgcagcaggagattaccaggtatcagtattatctgcaactgaagaaagatatcttggaaggaagtattccttgtaccttagaacaagcaattcagctagcaggcttagctgttcaagcggattttggtgactttgatcagtatgaatcccaggactttcttcagaaatttgccttgtttcctgtgggatggttacaagatgaaaaagtattggaagaagcaacccaaaaagtggccttactacatcagaaatacagagggctcacagctcctgatgctgaaatgctgtacatgcaggaggtagagagaatggatggctatggagaagagagctaccctgctaaggatagccaaggaagtgacatatccattggagcgtgtcttgaaggtatctttgtgaaacacaagaatggaaggcatcctgtggtatttaggtggcatgacattgccaacatgtcccacaacaagtccttttttgcattagagctggcaaataaagaggagaccattcaatttcaaactgaagacatggaaacagcaaaatacatttggagactctgtgttgcgcgacacaagttttacagactaaaccagtgtaacctgcaaactcagactgtcacagtgaacccaatcaggaggaggtcttcttcaaggatgtctctgcctaaaccccagccctacgtgatgcctcccccaccgcagttgcactataatggacattatacagaaccatatgcttcttcccaagataacctctttgtgcccaaccagaacggatactactgtcactctcagacaagcttggatagagcccagattgacctcaacggtcggatccgtaatggcagtgtctacagtgcacacagcaccaactccttaaataatcctcagccctacttgcagccctcgccgatgtcgtccaaccctagcatcaccgggagtgacgtcatgaggcctgactacctcccgtcccatcggcacagcgccgtgatacccccgtcctaccgccccaccccagactatgagactgtgatgaagcagctcaacaggggcctggtgcatgcggaacggcagagccactcgctgcgaaacctcaacatcggcagctcgtacgcctacagcaggcccgcggcgctggtctacagccagcccgagatccgcgagcacgcacagctcccctcgccagcggccgcacactgcccgttcagcctgagctacagcttccacagcccgtctccctacccctaccctgccgagcggcggcccgtggtgggcgcggtcagcgtgccggagctgaccaatgcgcagctgcaggcgcaggactacccgtctcccaacatcatgcggacgcaggtgtaccggccacccccaccctacccgccccccaggcccgccaacagcacgccagacctgtcccgccacctttacatcagcagcagcaaccccgacctcatcacgcggcgcgtgcaccactcggtgcaaacgttccaggaggacagcctgcccgtggcgcactcgctgcaggaggtcagcgagcccctcaccgccgcgcgccacgcgcagctgcacaaacggaacagcatcgaggtggccgggctcagccacggcctggagggcctgcggctcaaggagcgcaccctatccgcgtcggcggcagaggtggcgccgcgagccgtctcggtgggctcccagcccagcgttttcaccgagaggacacagcgagaagggccggaggaggcggagggcttgaggtacggccataagaagtccctgtcggacgccaccatgctaatccacagcagcgaggaggaggaggacgaggacttcgaggaggagagcggggcccgggcgcctcctgcacgtgcgcgcgagcctcggcccggcctggcccaggacccacctggctgccctcgcgtcctgctcgccgggcccctgcacatcctggagcccaaggcccacgtcccagacgcggagaagaggatgatggacagcagccccgtccgcacgaccgcagaggcccagcggccctggagagacgggctgctgatgccctccatgtcggagtccgacctcaccacgtcaggccgctaccgagcccggagggactctctgaagaaaaggccggtgtcggaccttctctctgggaagaagaacatcgtggaagggctcccgcctctagggggaatgaaaaagactcgagtagatgcaaaaaaaattggtcctcttaaactggctgccctaaatggactctccctatctcgagtgcctctgcctgatgaaggaaaggaagtggctaccagagcaacgaatgatgaaaggtgtaaaattctggaacaacgattagaacaaggaatggtattcacagaatatgaaagaattcttaagaaacggctagttgatggggagtgctcaacagcacgactccctgaaaatgcagaaagaaatcgattccaagatgttcttccttatgatgatgtgagagtggagttggtcccaactaaagaaaacaacactggttacatcaacgcatcacatattaaggtctctgtcagtggaatcgaatgggattatattgccacacagggaccattacagaatacctgtcaagatttttggcagatggtatgggaacagggaattgcaattatagcaatggtgacagcagaagaggagggtggaagggagaagagctttaggtactggccacgacttggttccaggcacaacactgtcacctatggaaggtttaagatcacgacccggttccgcacagactctggctgctatgccaccacaggcctgaagatgaagcacctccttactgggcaagagaggaccgtctggcacctccaatacacagactggcctgaacatggctgtccagaagacctcaagggatttttatcatatcttgaagagatccagtctgttcgacgccatacaaatagcacaagtgatccccaaagccccaaccctccgttgttggtccactgcagtgctggggtaggaaggactggcgtggtgattttgtcggagatcatgatcgcctgcctggaacacaatgaggtgctggacatcccgagagtgctggacatgctgaggcaacagagaatgatgctggtgcagactctctgccagtacacatttgtgtacagagtcctcatccagttcctgaaaagctccaggctcatctaagctcccacaatttcttacggggccagtcatgtgaagcgtttacagcttaaaaaaaaagcgcttgcctaactcatactttcccgttgacacttgatccacgcagcgtggcactgggacgtaagtggcgcagtctgaatggcggcacgctgaaggaaacgtgcgaagcacaggctgaagaggggtttctaacctgggaaaggtgctcaaggaggacttggtttca

SEQ ID NO: 57 - DNA, 828 bp, Homo sapiens
agttttcatccagccacgggccagcatgtctgggggcaaatacgtagactcggagggacatctctacaccgttcccatccgggaacagggcaacatctacaagcccaacaacaaggccatggcagacgagctgagcgagaagcaagtgtacgacgcgcacaccaaggagatcgacctggtcaaccgcgaccctaaacacctcaacgatgacgtggtcaagattgactttgaagatgtgattgcagaaccagaagggacacacagttttgacggcatttggaaggccagcttcaccaccttcactgtgacgaaatactggttttaccgcttgctgtctgccctctttggcatcccgatggcactcatctggggcatttacttcgccattctctctttcctgcacatctgggcagttgtaccatgcattaagagcttcctgattgagattcagtgcatcagccgtgtctattccatctacgtccacaccgtctgtgacccactctttgaagctgttgggaaaatattcagcaatgtccgcatcaacttgcagaaagaaatataaatgacatttcaaggatagaagtatacctgattttttttccttttaattttcctggtgccaatttcaagttccaagttgctaatacagcaacaatttatgaattgaattatcttggttgaaaataaaaagatcactttctcagttttcataagtattatgtctcttctgagctatttcatctatttttggcagtctgaatttttaaaacccatttaaatttttttccttacctttttatttgcatgtggatcaaccatcgctttatt

SEQ ID NO: 58 - DNA, 388 bp, Homo sapiens
acctcccaaccaagccctccagcaaggattcaggagtgcccctccggcctcgccatgaggctcttcctgtcgctcccggtcctggtggtggttctgtcgatcgtcttggaaggcccagccccagcccaggggaccccagacgtctccagtgccttggataagctgaaggagtttggaaacacactggtaggacaaggctcgggaactcatcagccgcatcaaacagagtgaactttctgccaagatgcgggagtggttttcagagacatttcagaaagtgaaggagaaactcaagattgactcatgaggacctgaagggtgacatcccaggaggggcctctgaaatttcccacaccccagcgcctgtgctgaggactccctccatgtg

SEQ ID NO: 59 - DNA, 1227 bp, Homo sapiens
caaagttagacaaaatgccaggaatgttcttctctgctaacccaaaggaattgaaaggaaccactcattcacttctagacgacaaaatgcaaaaaaggaggccaaagacttttggaatggatatgaaagcatacctgagatctatgatcccacatctggaatctggaatgaaatcttccaagtccaaggatgtactttctgctgctgaagtaatgcaatggtctcaatctctggaaaaacttcttgccaaccaaactggtcaaaatgtctttggaagtttcctaaagtctgaattcagtgaggagaatattgagttctggctggcttgtgaagactataagaaaacagagtctgatcttttgccctgtaaagcagaagagatatataaagcatttgtgcattcagatgctgctaaacaaatcaatattgacttccgcactcgagaatctacagccaagaagattaaagcaccaacccccacgtgttttgatgaagcacaaaaagtcatatatactcttatggaaaaggactcttatcccaggttcctcaaatcagatatttacttaaatcttctaaatgacctgcaggctaatagcctaaagtgactggtccctggctgaagggaattaacagatagtatcaagcgcagaaggaatgtgccagtatggctccctgggtgaacagcttggccttttttgggtgtcttgacaggccaagaagaacaaatgactcagaatggattaacatgaaagttatccaggcgcagagttgaagaagcataagcaagacaaaaacagagagaccgcaggaaggaggaagatactgtggtactgtcataaaaaacagtggagctctgtattagaaagcccctcagaactgggaaggccaggtaactctagttacacagaaactgtgactaaagtctatgaaactgattacaacagactgtaagaatcaaagtcaactgacatctatgctacatattattatatagtttgtactgagctattgaagtcccattaacttaaagtatatgttttcaaattgccattgctactattgcttgtcggtgttattttattttattgtttttgactttggaagagatgaactgtgtatttaacttaagctattgctcttaaaaccagggagtcagaatatatttgtaagttaaatcattggtgctaataataaatgtggattttgtattaaaatatatagaagcaa

SEQ ID NO: 60 - DNA, 649 bp, Homo sapiens
tcgggcctccgaaaccatgaactttctgctgtcttgggtgcattggagccttgccttgctgctctacctccaccatgccaagtggtcccaggctgcacccatggcagaaggaggagggcagaatcatcacgaagtggtgaagttcatggatgtctatcagcgcagctactgccatccaatcgagaccctggtggacatcttccaggagtaccctgatgagatcgagtacatcttcaagccatcctgtgtgcccctgatgcgatgcgggggctgctgcaatgacgagggcctggagtgtgtgcccactgaggagtccaacatcaccatgcagattatgcggatcaaacctcaccaaggccagcacataggagagatgagcttcctacagcacaacaaatgtgaatgcagaccaaagaaagatagagcaagacaagaaaatccctgtgggccttgctcagagcggagaaagcatttgtttgtacaagatccgcagacgtgtaaatgttcctgcaaaaacacagactcgcgttgcaaggcgaggcagcttgagttaaacgaacgtacttgcagatgtgacaagccgaggcggtgagccgggcaggaggaaggagcctccctcagggtttcgggaaccagatctctcaccagg

SEQ ID NO: 61 - DNA, 3391 bp, Homo sapiens
tctttgcagataaattattagtcataactgtagcaacaaaagaaagtgatggattccatcgatttatgcagtcagccaaatatttcaattatactgtgaaggtccttggtcaaggagaagaatggagaggtggtgatggaattaatagtattggagggggccagaaagtgagattaatgaaagaagtcatggaacactatgctgatcaagatgatctggttgtcatgtttactgaatgctttgatgtcatatttgctggtggtccagaagaagttctaaaaaaattccaaaaggcaaaccacaaagtggtctttgcagcagatggaattttgtggccagataaaagactagcagacaagtatcctgttgtgcacattgggaaacgctatctgaattcaggaggatttattggctatgctccatatgtcaaccgtatagttcaacaatggaatctccaggataatgatgatgatcagctcttttacactaaagtttacattgatccactgaaaagggaagctattaacatcacattggatcacaaatgcaaaattttccagaccttaaatggagctgtagatgaagttgttttaaaatttgaaaatggcaaagccagagctaagaatacattttatgaaacattaccagtggcaattaatggaaatggacccaccaagattctcctgaattattttggaaactatgtacccaattcatggacacaggataatggctgcactctttgtgaattcgatacagtcgacttgtctgcagtagatgtccatccaaacgtatcaataggtgtttttattgagcaaccaaccccttttctacctcggtttctggacatattgttgacactggattacccaaaagaagcacttaaactttttattcataacaaagaagtttatcatgaaaaggacatcaaggtattttttgataaagctaagcatgaaatcaaaactataaaaatagtaggaccagaagaaaatctaagtcaagcggaagccagaaacatgggaatggacttttgccgtcaggatgaaaagtgtgattattactttagtgtggatgcagatgttgttttgacaaatccaaggactttaaaaattttgattgaacaaaacagaaagatcattgctcctcttgtaactcgtcatggaaagctgtggtccaatttctggggagcattgagtcctgatggatactatgcacgatctgaagattatgtggatattgttcaagggaatagagtaggagtatggaatgtcccatatatggctaatgtgtacttaattaaaggaaagacactccgatcagagatgaatgaaaggaactattttgttcgtgataaactggatcctgatatggctctttgccgaaatgctagagaaatgggtgtatttatgtacatttctaatagacatgaatttggaaggctattatccactgctaattacaatacttcccattataacaatgacctctggcagatttttgaaaatcctgtggactggaaggaaaagtatataaaccgtgattattcaaagattttcactgaaaatatagttgaacagccctgtccagatgtcttttggttccccatattttctgaaaaagcctgtgatgaattggtagaagaaatggaacattacggcaaatggtctgggggaaaacatcatgatagccgtatatctggtggttatgaaaatgtcccaactgatgatatccacatgaagcaagttgatctggagaatgtatggcttcattttatccgggagttcattgcaccagttacactgaaggtctttgcaggctattatacgaagggatttgcactactgaattttgtagtaaaatactcccctgaacgacagcgttctcttcgtcctcatcatgatgcttctacatttaccataaacattgcacttaataacgtgggagaagactttcagggaggtggttgcaaatttctaaggtacaattgctctattgagtcaccacgaaaaggctggagcttcatgcatcctgggagactcacacatttgcatgaaggacttcctgttaaaaatggaacaagatacattgcagtgtcatttatagatccctaagttatttacttttcattgaattgaaatttattttgggtgaatgactggcatgaacacgtctttgaagttgtggctgagaagatgagaggaatatttaaataacatcaacagaacaacttcactttgggccaaacatttgaaaaactttttataaaaaattgtttgatattgcttaatgtctgctctgagccttaaaacacagattgaagaagaaaagaaagaaaaaacttaaatatttatttctatgctttgttgcctctgagaataatgacaatttatgaatttgtgtttcaaattgataaaatatttaggtacaaataacaagactaataatattttcttatttaaaaaaagcatgggaagatttttatttatcaaaatatagaggaaatgtagacaaaatggatataaatgaaaattaccatgttgtaaaaccttgaaaatcagattctaactggatttgtatgcaactaagtatttttctgaacacctatgcaggtcttatttacagtagttactaagggaacacacaaagaattacacaacgttttcctcaagaaaatggtacaaaacacaaccgaggagcgtatacagttgaaaacatttttgttttgattggaaggcagattattttatattagtattaaaaatcaaaccctatgtttctttcagatgaatcttccaaagtggattatattaagcaggtattagatttaggaaaacctttccatttcttaaagtattatcaagtgtcaagatcagcaagtgtccttaagtcaaacaggttttttttgttgttgtttttgctttgtttccttttttagaaagttctagaaaataggaaaacgaaaaatttcattgagatgagtagtgcatttaattattttttaaaaaactttttaagtacttgaattttatatcaggaaaacaaagttgttgagccttgcttcttccgttttgccctttgtctcgctccttattctttttttggggggagggttatttgcttttttatcttcctggcataatttccattttattcttctgagtgtctatgttaacttccctctatcccgcttataaaaaaattctccaacaaaaatacttgttgacttgatgttttatcacttctctaagtaaggttgaaatatccttattgtagctactgtttttaatgtaaaggttaaacttgaaaagaaattcttaatcacggtgccaaaattcattttctaacaccatgtgttagaaaattataaaaaataaaataattttagaaa

SEQ ID NO: 62 - DNA, 518 bp, Homo sapiens
agatcaccctctacgaggaccggggcttccagggccgccactacgaatgcagcagcgaccaccccaacctgcagccctacttgagccgctgcaactcggcgcgcgtggacagcggctgctggatgctctatgagcagcccaactactcgggcctccagtacttcctgcgccgcggcgactatgccgaccaccagcagtggatgggcctcagcgactcggtccgctcctgccgcctcatcccccactctggctctcacaggatcagactctatgagagggaggactacagaggccagatgatagagttcactgaggactgctcctgtcttcaggaccgcttccgcttcaatgaaatccactccctcaacgtgctggagggctcctgggtcctctacgagctgtccaactaccgaggacggcagtacctgctgatgccaggggactataggcgctaccaggactggggggccacgaatgccagagtgggctctctgaggagagtcatagatttctcctga

SEQ ID NO: 63 - DNA, 450 bp, Homo sapiens
atgcgccctgcagccctgcgcggggccctgctgggctgcctctgcctggcgttgctttgcctgggcggtgcggacaagcgcctgcggaagcatgagtgggaaaagcatgggacctgcgccgcccaggtggatgcgctcaactcccagaagaagtactttggcagaagcctggaactctacagggagctggacctcaacagtgtgcttctaaaattggggataaaaccatccatcaattactaccaagatgaggaagtacagacaattggtcagatagaactgtgcctcactaagcaagaccagcagctgcaaaactgcaccgagccgggggagcagccgtcccccaagcaggaagtctggctggcaaatggggccgccgagagctggggtctgagagtctgtgaagatggcccagtcttctatcccccacctaaaaagaccaagcattga

SEQ ID NO: 64 - DNA, 2854 bp, Homo sapiens
tagtcgcgggtccccgagtgagcacgccagggagcaggagaccaaacgacgggggtcggagtcagagtcgcagtgggagtccccggaccggagcacgagcctgagcgggagagcgccgctcgcacgcccgtcgccacccgcgtacccggcgcagccagagccaccagcgcagcgctgccatggagcccagcagcaagaagctgacgggtcgcctcatgctggccgtgggaggagcagtgcttggctccctgcagtttggctacaacactggagtcatcaatgccccccagaaggtgatcgaggagttctacaaccagacatgggtccaccgctatggggagagcatcctgcccaccacgctcaccacgctctggtccctctcagtggccatcttttctgttgggggcatgattggctccttctctgtgggccttttcgttaaccgctttggccggcggaattcaatgctgatgatgaacctgctggccttcgtgtccgccgtgctcatgggcttctcgaaactgggcaagtcctttgagatgctgatcctgggccgcttcatcatcggtgtgtactgcggcctgaccacaggcttcgtgcccatgtatgtgggtgaagtgtcacccacagcccttcgtggggccctgggcaccctgcaccagctgggcatcgtcgtcggcatcctcatcgcccaggtgttcggcctggactccatcatgggcaacaaggacctgtggcccctgctgctgagcatcatcttcatcccggccctgctgcagtgcatcgtgctgcccttctgccccgagagtccccgcttcctgctcatcaaccgcaacgaggagaaccgggccaagagtgtgctaaagaagctgcgcgggacagctgacgtgacccatgacctgcaggagatgaaggaagagagtcggcagatgatgcgggagaagaaggtcaccatcctggagctgttccgctcccccgcctaccgccagcccatcctcatcgctgtggtgctgcagctgtcccagcagctgtctggcatcaacgctgtcttctattactccacgagcatcttcgagaaggcgggggtgcagcagcctgtgtatgccaccattggctccggtatcgtcaacacggccttcactgtcgtgtcgctgtttgtggtggagcgagcaggccggcggaccctgcacctcataggcctcgctggcatggcgggttgtgccatactcatgaccatcgcgctagcactgctggagcagctaccctggatgtcctatctgagcatcgtggccatctttggctttgtggccttctttgaagtgggtcctggccccatcccatggttcatcgtggctgaactcttcagccagggtccacgtccagctgccattgccgttgcaggcttctccaactggacctcaaatttcattgtgggcatgtgcttccagtatgtggagcaactgtgtggtccctacgtcttcatcatcttcactgtgctcctggttctgttcttcatcttcacctacttcaaagttcctgagactaaaggccggaccttcgatgagatcgcttccggcttccggcaggggggagccagccaaagtgacaagacacccgaggagctgttccatcccctgggggctgattcccaagtgtgagtcgccccagatcaccagcccggcctgctcccagcagccctaaggatctctcaggagcacaggcagctggatgagacttccaaacctgacagatgtcagccgagccgggcctggggctcctttctccagccagcaatgatgtccagaagaatattcaggacttaacggctccaggattttaacaaaagcaagactgttgctcaaatctattcagacaagcaacaggttttataatttttttattactgattttgttatttttatatcagcctgagtctcctgtgcccacatcccaggcttcaccctgaatggttccatgcctgagggtggagactaagccctgtcgagacacttgccttcttcacccagctaatctgtagggctggacctatgtcctaaggacacactaatcgaactatgaactacaaagcttctatcccaggaggtggctatggccacccgttctgctggcctggatctccccactctaggggtcaggctccattaggatttgccccttcccatctcttcctacccaaccactcaaattaatctttctttacctgagaccagttgggagcactggagtgcagggaggagaggggaagggccagtctgggctgccgggttctagtctcctttgcactgagggccacactattaccatgagaagagggcctgtgggagcctgcaaactcactgctcaagaagacatggagactcctgccctgttgtgtatagatgcaagatatttatatatatttttggttgtcaatattaaatacagacactaagttatagtatatctggacaagccaacttgtaaatacaccacctcactcctgttacttacctaaacagatataaatggctggtttttagaaacatggttttgaaatgcttgtggattgagggtaggaggtttggatgggagtgagacagaagtaagtggggttgcaaccactgcaacggcttagacttcgactcaggatccagtcccttacacgtacctctcatcagtgtcctcttgctcaaaaatctgtttgatccctgttacccagagaatatatacattctttatcttgacattcaaggcatttctatcacatatttgatagttggtgttcaaaaaaacactagttttgtgccagccgtgatgctcaggcttgaaatgcattattttgaatgtgaagtaa

SEQ ID NO: 65 - DNA, 1679 bp, Homo sapiens
gtttgttggctgcggcagcaggtagcaaagtgacgccgagggcctgagtgctccagtagccaccgcatctggagaaccagcggttaccatggaggggatcagtatatacacttcagataactacaccgaggaaatgggctcaggggactatgactccatgaaggaaccctgtttccgtgaagaaaatgctaatttcaataaaatcttcctgcccaccatctactccatcatcttcttaactggcattgtgggcaatggattggtcatcctggtcatgggttaccagaagaaactgagaagcatgacggacaagtacaggctgcacctgtcagtggccgacctcctctttgtcatcacgcttcccttctgggcagttgatgccgtggcaaactggtactttgggaacttcctatgcaaggcagtccatgtcatctacacagtcaacctctacagcagtgtcctcatcctggccttcatcagtctggaccgctacctggccatcgtccacgccaccaacagtcagaggccaaggaagctgttggctgaaaaggtggtctatgttggcgtctggatccctgccctcctgctgactattcccgacttcatctttgccaacgtcagtgaggcagatgacagatatatctgtgaccgcttctaccccaatgacttgtgggtggttgtgttccagtttcagcacatcatggttggccttatcctgcctggtattgtcatcctgtcctgctattgcattatcatctccaagctgtcacactccaagggccaccagaagcgcaaggccctcaagaccacagtcatcctcatcctggctttcttcgcctgttggctgccttactacattgggatcagcatcgactccttcatcctcctggaaatcatcaagcaagggtgtgagtttgagaacactgtgcacaagtggatttccatcaccgaggccctagctttcttccactgttgtctgaaccccatcctctatgctttccttggagccaaatttaaaacctctgcccagcacgcactcacctctgtgagcagagggtccagcctcaagatcctctccaaaggaaagcgaggtggacattcatctgtttccactgagtctgagtcttcaagttttcactccagctaacacagatgtaaaagacttttttttatacgataaataacttttttttaagttacacatttttcagatataaaagactgaccaatattgtacagtttttattgcttgttggatttttgtcttgtgtttctttagtttttgtgaagtttaattgacttatttatataaattttttttgtttcatattgatgtgtgtctaggcaggacctgtggccaagttcttagttgctgtatgtctcgtggtaggactgtagaaaagggaactgaacattccagagcgtgtagtgaatcacgtaaagctagaaatgatccccagctgtttatgcatagataatctctccattcccgtggaacgtttttcctgttcttaagacgtgattttgctgtagaagatggcacttataaccaaagcccaaagtggtatagaaatgctggtttttcagttttcaggagtgggttgatttcagcacctacagtgtacagtcttgtattaagttgttaataaaagtacatgttaaacttacttagtgttatg

SEQ ID NO: 66 - DNA, 1440 bp, Homo sapiens
atgggctgctccgccaaagcgcgctgggctgccggggcgctgggcgtcgcggggctactgtgcgctgtgctgggcgctgtcatgatcgtgatggtgccgtcgctcatcaagcagcaggtccttaagaacgtgcgcatcgaccccagtagcctgtccttcaacatgtggaaggagatccctatccccttctatctctccgtctacttctttgacgtcatgaaccccagcgagatcctgaagggcgagaagccgcaggtgcgggagcgcgggccctacgtgtacagggagttcaggcacaaaagcaacatcaccttcaacaacaacgacaccgtgtccttcctcgagtaccgcaccttccagttccagccctccaagtcccacggctcggagagcgactacatcgtcatgcccaacatcctggtcttgggtgcggcggtgatgatggagaataagcccatgaccctgaagctcatcatgaccttggcattcaccaccctcggcgaacgtgccttcatgaaccgcactgtgggtgagatcatgtggggctacaaggacccccttgtgaatctcatcaacaagtactttccaggcatgttccccttcaaggacaagttcggattatttgctgagctcaacaactccgactctgggctcttcacggtgttcacgggggtccagaacatcagcaggatccacctcgtggacaagtggaacgggctgagcaaggttgacttctggcattccgatcagtgcaacatgatcaatggaacttctgggcaaatgtggccgcccttcatgactcctgagtcctcgctggagttctacagcccggaggcctgccgatccatgaagctaatgtacaaggagtcaggggtgtttgaaggcatccccacctatcgcttcgtggctcccaaaaccctgtttgccaacgggtccatctacccacccaacgaaggcttctgcccgtgcctggagtcctggaattcagaacgtcagcacctgcaggttcagtacgtgccgtcccctgtgctgggatggcgggagggtgtcacgggaatccccatgaactgctctgtgaaactgcagctgagcctctacatgaaatctgtcgcaggcattggacaaactgggaagattgagcctgtggtcctgccgctgctctggtttgcagagagcggggccatggagggggagactcttcacacattctacactcagctggtgttgatgcccaaggtgatgcactatgcccagtacgtcctcctggcgctgggctgcgtcctgctgctggtccctgtcatctgccaaatccggagccaaggtcctgaggacaccgtgagccagccaggcctggccgctgggcctgaccggccccccagcccctacaccccgcttctcccggactctcccagcggacagccccccagccccacagcctga

SEQ ID NO: 67 - DNA, 1193 bp, Homo sapiens
cagatccatcaggtccaagctgtgttgactaccactacttttcccttcgtctcaattatgtcttggaagaaggctttgcggatccctggaggccttcgggtagcaactgtgaccttgatgctggcgatgctgagcaccccggtggctgagggcagagactctcccgaggatttcgtgttccagtttaagggcatgtgctacttcaccaacgggaccgagcgcgtgcggggtgtgaccagatacatctataaccgagaggagtacgcgcgcttcgacagcgacgtgggggtgtatcgggcggtgacgccgctggggcggcttgacgccgagtactggaatagccagaaggacatcctggaggaggaccgggcgtcggtggacaccgtatgcagacacaactaccagttggagctccgcacgaccttgcagcggcgagtggagcccacagtgaccatctccccatccaggacagaggccctcaaccaccacaacctgctggtctgctcagtgacagatttctatccagcccagatcaaagtccggtggtttcggaatgaccaggaggagacaactggcgttgtgtccaccccccttattaggaacggtgactggaccttccagatcctggtgatgctggaaatgactccccagcgtggagacgtctacacctgccacgtggagcaccccagcctccagaaccccatcatcgtggagtggcgggctcagtctgaatctgcccagagcaagatgctgagtggcattggaggcttcgtgctggggctgatcttcctcgggctgggccttattatccatcacaggagtcagaaagggctcctgcactgactcctgagactattttaactgggattggttatcacttttctgtaacgcctgcttgtccctgcccagaattcccagctgtctgtgtcagcctgtccccctgagatcagagtcctacagtggctgtcacgcagccaccaggtcatctcctttcatccccaccttgaggcggatggctgtgaccctacttcctgcactgacccacagcccctgcctgtgcacagccagctgcatctactcaggccccaaggggtttctgtttctattctctcctcagactgctcaagagaagcacatgaaaactattacctgactttagagcttttttacataattaaacatgatcctgagtt

SEQ ID NO: 68 - DNA, 330 bp, Homo sapiens
cgacataacccacacgagaacatgcctctcgcaaaggatctccttcatccctctccagaacaggagaagaggaaacacaagaagaaacgcctggtgcagagccccaattcctacttcatggatgtgaaatgcccaggatgctataaaatcaccacagtctttagccacgcacaaacggtagttttgtgtgttggctgctccactgtcctctgccagcctacaggaggaaaagcaaggcttacagaaggttattccttcacgaggaagcagcactaaaagcactctgaatcaagatgagtgggaaaccatctcaataaacacattttggat

SEQ ID NO: 69 - DNA, 1250 bp, Homo sapiens
ggttggctctgacacgttttattccttcaagtacgaaatcaaggagggggattgtcctgttcaaagtggcaaaacctggcaggactgtgagtacaaggatgctgcaaaagcagccactggagaatgcacggcaaccgtggggaagaggagcagtacgaaattctccgtggctacccagacctgccagattactccagccgagggccctgtggtgacagcccagtacgactgcctcggctgtgtgcatcctatatcaacgcagagcccagacctggagcccattctgagacacggcattcagtactttaacaacaacactcaacattcctccctcttcacgcttaatgaagtaaaacgggcccaaagacaggtggtggctggattgaactttcgaattacctactcaattgtgcaaacgaattgttccaaagagaattttctgttcttaactccagactgcaagtccctttggaatggtgataccggtgaatgtacagataatgcatacatcgatattcagctacgaattgcttccttctcacagaactgtgacatttatccagggaaggattttgtacaaccacctaccaagatttgcgtgggctgccccagagatatacccaccaacagcccagagctggaggagacactgactcacaccatcacaaagcttaatgcagagaataacgcaactttctatttcaagattgacaatgtgaaaaaagcaagagtacaggtggtggctggcaagaaatattttattgacttcgtggccagggaaaccacatgttccaaggaaagtaatgaagagttgaccgaaagctgtgagaccaaaaaacttggccaaagcctagattgcaacgctgaagtttatgtggtaccctgggagaaaaaaatttaccctactgtcaactgtcaaccactgggaatgatctcactgatgaaaaggcctccaggtttttcacctttccgatcatcacgaataggggaaataaaagaagaaacaactagtcacctaaggtcctgcgagtacaagggtcgacccccaaaggcaggggcagagccagcatctgagagggaggtctcttgaccaatgggcagaatcttcactccaggcacatagccccaaccacctctgccagcaaccttgagaggaaggacaagaagaaagatgggatagaatttaaatagagaagaatgccattttatcactctgcctctgggtgaaataaagatcagtcttgatgttc

SEQ ID NO: 70 - DNA, 489 bp, Homo sapiens
agagccgcaggtcagtcgtgaagagggagctctattgccaccatgagtttctccggcaagtaccaactgcagagccaggaaaactttgaagccttcatgaaggcaatcggtctgccggaagagctcatccagaaggggaaggatatcaagggggtgtcggaaatcgtgcagaatgggaagcacttcaagttcaccatcaccgctgggtccaaagtgatccaaaacgaattcacggtgggggaggaatgtgagctggagacaatgacaggggagaaagtcaagacagtggttcagttggaaggtgacaataaactggtgacaactttcaaaaacatcaagtctgtgaccgaactcaacggcgacataatcaccaataccatgacattgggtgacattgtcttcaagagaatcagcaagagaatttaaacaagtctgcatttcatattattttagtgtgtaaaattaatgtaataaagtgaactttgtttt

SEQ ID NO: 71 - DNA, 2681 bp, Homo sapiens
cagctgggggtaaggggggcggattattcatataattgttataccagacggtcgcaggcttagtccaattgcagagaactcgcttcccaggcttctgagagtcccggaagtgcctaaacctgtctaatcgacggggcttgggtggcccgtcgctccctggcttcttccctttacccagggcgggcagcgaagtggtgcctcctgcgtcccccacaccctccctcagcccctcccctccggcccgtcctgggcaggtgacctggagcatccggcaggctgccctggcctcctgcgtcaggacaacgcccacgaggggcgttactgtgcggagatgcaccacgcaagagacaccctttgtaactctcttctcctccctagtgcgaggttaaaaccttcagccccccgtgctgtttgcaaacctgcctgtacctgaggccctaaaaagccagagacctcactcccggggagccagcatgtccactgcggtcctggaaaacccaggcttgggcaggaaactctctgactttggacaggaaacaagctatattgaagacaactgcaatcaaaatggtgccatatcactgatcttctcactcaaagaagaagttggtgcattggccaaagtattgcgcttatttgaggagaatgatgtaaacctgacccacattgaatctagaccttctcgtttaaagaaagatgagtatgaatttttcacccatttggataaacgtagcctgcctgctctgacaaacatcatcaagatcttgaggcatgacattggtgccactgtccatgagctttcacgagataagaagaaagacacagtgccctggttcccaagaaccattcaagagctggacagatttgccaatcagattctcagctatggagcggaactggatgctgaccaccctggttttaaagatcctgtgtaccgtgcaagacggaagcagtttgctgacattgcctacaactaccgccatgggcagcccatccctcgagtggaatacatggaggaagaaaagaaaacatggggcacagtgttcaagactctgaagtccttgtataaaacccatgcttgctatgagtacaatcacatttttccacttcttgaaaagtactgtggcttccatgaagataacattccccagctggaagacgtttctcaattcctgcagacttgcactggtttccgcctccgacctgtggctggcctgctttcctctcgggatttcttgggtggcctggccttccgagtcttccactgcacacagtacatcagacatggatccaagcccatgtatacccccgaacctgacatctgccatgagctgttgggacatgtgcccttgttttcagatcgcagctttgcccagttttcccaggaaattggccttgcctctctgggtgcacctgatgaatacattgaaaagctcgccacaatttactggtttactgtggagtttgggctctgcaaacaaggagactccataaaggcatatggtgctgggctcctgtcatcctttggtgaattacagtactgcttatcagagaagccaaagcttctccccctggagctggagaagacagccatccaaaattacactgtcacggagttccagcccctgtattacgtggcagagagttttaatgatgccaaggagaaagtaaggaactttgctgccacaatacctcggcccttctcagttcgctacgacccatacacccaaaggattgaggtcttggacaatacccagcagcttaagattttggctgattccattaacagtgaaattggaatcctttgcagtgccctccagaaaataaagtaaagccatggacagaatgtggtctgtcagctgtgaatctgttgatggagatccaactatttctttcatcagaaaaagtccgaaaagcaaaccttaatttgaaataacagccttaaatcctttacaagatggagaaacaacaaataagtcaaaataatctgaaatgacaggatatgagtacatactcaagagcataatggtaaatcttttggggtcatctttgatttagagatgataatcccatactctcaattgagttaaatcagtaatctgtcgcatttcatcaagattaattaaaatttgggacctgcttcattcaagcttcatatatgctttgcagagaactcataaaggagcatataaggctaaatgtaaaacacaagactgtcattagaattgaattattgggcttaatataaatcgtaacctatgaagtttattttctattttagttaactatgattccaattactactttgttattgtacctaagtaaattttctttaagtcagaagcccattaaaatagttacaagcattgaacttctttagtattatattaatataaaaacatttttgtatgttttattgtaatcataaatactgctgtataaggtaataaaactctgcacctaatccccataacttccagtatcattttccaattaattatcaagtctgttttgggaaacactttgaggacatttatgatgcagcagatgttgactaaaggcttggttggtagatattcaggaaatgttcactgaataaataagtaaatacattattgaaaagcaaatctgtataaatgtgaaatttttatttgtattagtaataaaacattagtagttta

SEQ ID NO: 72 - DNA, 4306 bp, Homo sapiens
ggtcctgcacccttcttaattttctcccatggaaatagtatctttaggattgacacagaaggaaccaattatgagcaattggtggtggatgctggtgtctcagtgatcatggattttcattataatgagaaaagaatctattgggtggatttagaaagacaacttttgcaaagagtttttctgaatgggtcaaggcaagagagagtatgtaatatagagaaaaatgtttctggaatggcaataaattggataaatgaagaagttatttggtcaaatcaacaggaaggaatcattacagtaacagatatgaaaggaaataattcccacattcttttaagtgctttaaaatatcctgcaaatgtagcagttgatccagtagaaaggtttatattttggtcttcagaggtggctggaagcctttatagagcagatctcgatggtgtgggagtgaaggctctgttggagacatcagagaaaataacagctgtgtcattggatgtgcttgataagcggctgttttggattcagtacaacagagaaggaagcaattctcttatttgctcctgtgattatgatggaggttctgtccacattagtaaacatccaacacagcataatttgtttgcaatgtccctttttggtgaccgtatcttctattcaacatggaaaatgaagacaatttggatagccaacaaacacactggaaaggacatggttagaattaacctccattcatcatttgtaccacttggtgaactgaaagtagtgcatccacttgcacaacccaaggcagaagatgacacttgggagcctgagcagaaactttgcaaattgaggaaaggaaactgcagcagcactgtgtgtgggcaagacctccagtcacacttgtgcatgtgtgcagagggatacgccctaagtcgagaccggaagtactgtgaagatgttaatgaatgtgctttttggaatcatggctgtactcttgggtgtaaaaacacccctggatcctattactgcacgtgccctgtaggatttgttctgcttcctgatgggaaacgatgtcatcaacttgtttcctgtccacgcaatgtgtctgaatgcagccatgactgtgttctgacatcagaaggtcccttatgtttctgtcctgaaggctcagtgcttgagagagatgggaaaacatgtagcggttgttcctcacccgataatggtggatgtagccagctctgcgttcctcttagcccagtatcctgggaatgtgattgctttcctgggtatgacctacaactggatgaaaaaagctgtgcagcttcaggaccacaaccatttttgctgtttgccaattctcaagatattcgacacatgcattttgatggaacagactatggaactctgctcagccagcagatgggaatggtttatgccctagatcatgaccctgtggaaaataagatatactttgcccatacagccctgaagtggatagagagagctaatatggatggttcccagcgagaaaggcttattgaggaaggagtagatgtgccagaaggtcttgctgtggactggattggccgtagattctattggacagacagagggaaatctctgattggaaggagtgatttaaatgggaaacgttccaaaataatcactaaggagaacatctctcaaccacgaggaattgctgttcatccaatggccaagagattattctggactgatacagggattaatccacgaattgaaagttcttccctccaaggccttggccgtctggttatagccagctctgatctaatctggcccagtggaataacgattgacttcttaactgacaagttgtactggtgcgatgccaagcagtctgtgattgaaatggccaatctggatggttcaaaacgccgaagacttacccagaatgatgtaggtcacccatttgctgtagcagtgtttgaggattatgtgtggttctcagattgggctatgccatcagtaatgagagtaaacaagaggactggcaaagatagagtacgtctccaaggcagcatgctgaagccctcatcactggttgtggttcatccattggcaaaaccaggagcagatccctgcttatatcaaaacggaggctgtgaacatatttgcaaaaagaggcttggaactgcttggtgttcgtgtcgtgaaggttttatgaaagcctcagatgggaaaacgtgtctggctctggatggtcatcagctgttggcaggtggtgaagttgatctaaagaaccaagtaacaccattggacatcttgtccaagactagagtgtcagaagataacattacagaatctcaacacatgctagtggctgaaatcatggtgtcagatcaagatgactgtgctcctgtgggatgcagcatgtatgctcggtgtatttcagagggagaggatgccacatgtcagtgtttgaaaggatttgctggggatggaaaactatgttctgatatagatgaatgtgagatgggtgtcccagtgtgcccccctgcctcctccaagtgcatcaacaccgaaggtggttatgtctgccggtgctcagaaggctaccaaggagatgggattcactgtcttgatattgatgagtgccaactgggggagcacagctgtggagagaatgccagctgcacaaatacagagggaggctatacctgcatgtgtgctggacgcctgtctgaaccaggactgatttgccctgactctactccaccccctcacctcagggaagatgaccaccactattccgtaagaaatagtgactctgaatgtcccctgtcccacgatgggtactgcctccatgatggtgtgtgcatgtatattgaagcattggacaagtatgcatgcaactgtgttgttggctacatcggggagcgatgtcagtaccgagacctgaagtggtgggaactgcgccacgctggccacgggcagcagcagaaggtcatcgtggtggctgtctgcgtggtggtgcttgtcatgctgctcctcctgagcctgtggggggcccactactacaggactcagaagctgctatcgaaaaacccaaagaatccttatgaggagtcgagcagagatgtgaggagtcgcaggcctgctgacactgaggatgggatgtcctcttgccctcaaccttggtttgtggttataaaagaacaccaagacctcaagaatgggggtcaaccagtggctggtgaggatggccaggcagcagatgggtcaatgcaaccaacttcatggaggcaggagccccagttatgtggaatgggcacagagcaaggctgctggattccagtatccagtgataagggctcctgtccccaggtaatggagcgaagctttcatatgccctcctatgggacacagacccttgaagggggtgtcgagaagccccattctctcctatcagctaacccattatggcaacaaagggccctggacccaccacaccaaatggagctgactcagtgaaaactggaattaaaaggaaagtcaagaagaatgaactatgtcgatgcacagtatcttttctttcaaaagtagagcaaaactataggttttggttccacaatctctacgactaatcacctactcaatgcctggagacagatacgtagttgtgcttttgtttgctcttttaagcagtctcactgcagtcttatttccaagtaagagtactgggagaatcactaggtaacttattagaaacccaaattgggacaacagtgctttgtaaattgtgttgtcttcagcagtcaatacaaatagatttttgtttttgttgttcctgcagccccagaagaaattaggggttaaagcagacagtcacactggtttggtcagttacaaagtaatttctttgatctggacagaacatttatatcagtttcatgaaatgattggaatattacaataccgttaagatacagtgtaggcatttaactcctcattggcgtggtccatgctgatgattttgcaaaatgagttgtgatgaatcaatgaaaaatgtaatttagaaactgatttcttcagaattagatggcttattttttaaaatatttgaatgaaaacattttatttttaaaatattacacaggaggcttcggagtttcttagtcattactgtccttttcccctacagaattttccctcttggtgtgattgcacagaatttgtatgtattttcagttacaagattgtaagtaaattgcctgatttgttttcattatagacaacgatgaatttcttctaattatttaaataaaatcaccaaaaacat

SEQ ID NO: 73 - DNA, 1652 bp, Homo sapiens
aaaaacatgatgagaagtctataaaaattgtgtgctaccaaagatctgtcttatttggcagctgctgcctcacccacagcttttgatatctaggaggactcttctctcccaaactacctgtcaccatggcccaccgatttccagccctcacccaggagcagaagaaggagctctcagaaattgcccagagcattgttgccaatggaaaggggatcctggctgcagatgaatctgtaggtaccatggggaaccgcctgcagaggatcaaggtggaaaacactgaagagaaccgccggcagttccgagaaatcctcttctctgtggacagttccatcaaccagagcatcgggggtgtgatccttttccacgagaccctctaccagaaggacagccagggaaagctgttcagaaacatcctcaaggaaaaggggatcgtggtgggaatcaagttagaccaaggaggtgctcctcttgcaggaacaaacaaagaaaccaccattcaagggcttgatggcctctcagagcgctgtgctcagtacaagaaagatggtgttgactttgggaagtggcgtgctgtgctgaggattgccgaccagtgtccatccagcctcgctatccaggaaaacgccaacgccctggctcgctacgccagcatctgtcagcagaatggactggtacctattgttgaaccagaggtaattcctgatggagaccatgacctggaacactgccagtatgttactgagaaggtcctggctgctgtctacaaggccctgaatgaccatcatgtttacctggagggcaccctgctaaagcccaacatggtgactgctggacatgcctgcaccaagaagtatactccagaacaagtagctatggccaccgtaacagctctccaccgtactgttcctgcagctgttcctggcatctgctttttgtctggtggcatgagtgaagaggatgccactctcaacctcaatgctatcaacctttgccctctaccaaagccctggaaactaagtttctcttatggacgggccctgcaggccagtgcactggctgcctggggtggcaaggctgcaaacaaggaggcaacccaggaggcttttatgaagcgggccatggctaactgccaggcggccaaaggacagtatgttcacacgggttcttctggggctgcttccacccagtcgctcttcacagcctgctatacctactagggtccaatgcccgccagcctagctccagtgcttctagtaggagggctgaaagggagcaacttttcctccaatcctggaaattcgacacaattagatttgaactgctggaaatacaacacatgttaaatcttaagtacaagggggaaaaaataaatcagttattgaaacataaaaatgaataccaaggacctgatcaaatttcacacagcagtttccttgcaacactttcagctccccatgctccagaatacccacccaagaaaataataggctttaaaacaatatcggctcctcatccaaagaacaactgctgattgaaacacctcattagctgagtgtagagaagtgcatcttatgaaacagtcttagcagtggtaggttgggaaggagatagctgcaaccaaaaaagaaataaatattctataaaccttc

SEQ ID NO: 74 - DNA, 1389 bp, Homo sapiens
atgcgccgcccgtggccatcttgtaggcggggacacgccgaggtaacttccagggtgcgccttcgttgtcttctccaagctgtagttctacgtcccgacctccctatcataccacactcttcagcgaccacgcaggcactttcccggtccccagcggcaaccagttctttttcttctccaaatgtatcctccatggagtccttcccaccactcgcatactctactcctcagccgccccttcctcctgtgaggccttcagcaccattaccttttgtgcctcctcctgcagttccttctgtcccaccacttgttacttctatgccacctcctgtttctccatcaactgctgctgccttcggtaatcctcctgtatctcacttcccaccttcaacttctgccccaaacactcttttacctgcacccccttcgggtcctcctatatcaggattttctgttggttcaacttatgacattacaaggggacatgctgggagagctccccagacacccctgatgccatcattttctgcaccttcaggaacaggtcttttgccaactcctattactcagcaagccagtttgacatctctggcacagggaactggaaccacatcagccattactttcccagaggagcaagaagaccctagaattactagaggtcaggatgaagcatctgctggtggaatctggggttttattaagggtgtggctgggaatcctatggtgaagtctgtgcttgataagacaaaacattcagtagaaagcatgattacaacgctggaccctggcatggctccctatatcaaatctggaggtgaactggatattgtagtgacctcaaataaagaagtaaaagttgctgctgtccgagatgccttccaggaggtctttggcttagctgtggttgtaggggaagctggacagtccaatattgccccacaaccagtgggctatgcagctggattaaaaggtgctcaggaacggatagatagcttgcgtcgaactggggtgatccatgaaaaacagacagctgtgtcagtagaaaacttcattgcagaattgctgcctgacaaatggtttgacattggttgtttggtggttgaagatcctgtccatggcattcatctagaaacatttacacaagccacaccagtgcctttggaatttgtacagcaggctcaaagtctaactccccaggactataatctgaggtggtcaggccttttggtgacagtgggtgaagtcctggaaaagagtttactgaatgtcagccggactgattggcacatggcatttactgggatgtcccgtcggcagatgatctacagtgcagccagagcgatagcgggcatgtataaacagcgcctgccacccaggacagtgtga

SEQ ID NO: 75 - DNA, 2732 bp, Homo sapiens
aacaacatcctgggactgggacacactttctgggcactgctggccagtcccaaaatggaacataaggaagtggttcttctacttcttttatttctgaaatcaggtcaaggagagcctctggatgactatgtgaatacccagggggcttcactgttcagtgtcactaagaagcagctgggagcaggaagtatagaagaatgtgcagcaaaatgtgaggaggacgaagaattcacctgcagggcattccaatatcacagtaaagagcaacaatgtgtgataatggctgaaaacaggaagtcctccataatcattaggatgagagatgcagttttatttgaaaagtaaatgtatctttcagagtgcaagactgggaatggaaagaactacagagggacgatgtccaaaacaaaaaatggcatcacctgtcaaaaatggagttccacttctccccgcaaacctagattctcacctgctacacacccctcagagggactggaggagaactactgcaggaatccagacaacgatccgcaggggccctggtgctatactactgatccagaaaagagatatgactactgcgacattcttgagtgtgaagaggaatgtatgcattgcagtggagaaaactatgacggcaaaatttccaagaccatgtctggactggaatgccaggcctgggactctcagagcccacacgctcatggatacattccttccaaatttccaaacaagaacctgaagaagaattactgtcgtaaccccgatagggagctgcggccttggtgtttcaccaccgaccccaacaagcgctgggaactttgtgacatcccccgctgcacaacacctccaccatcttctggtcccacctaccagtgtctgaagggaacaggtgaaaactatcgcgggaatgtggctgttaccgtgtccgggcacacctgtcagcactggagtgcacagacccctcacacacataacaggacaccagaaaacttcccctgcaaaaatttggatgaaaactactgccgcaatcctgacggaaaaagggccccatggtgccatacaaccaacagccaagtgcggtgggagtactgtaagataccgtcctgtgactcctccccagtatccacggaacaattggctcccacagcaccacctgagctaacccctgtggtccaggactgctaccatggtgatggacagagctaccgaggcacatcctccaccaccaccacaggaaagaagtgtcagtcttggtcatctatgacaccacaccggcaccagaagaccccagaaaactacccaaatgctggcctgacaatgaactactgcaggaatccagatgccgataaaggcccctggtgttttaccacagaccccagcgtcaggtgggagtactgcaacctgaaaaaatgctcaggaacagaagcgagtgttgtagcacctccgcctgttgtcctgcttccagatgtagagactccttccgaagaagactgtatgtttgggaatgggaaaggataccgaggcaagagggcgaccactgttactgggacgccatgccaggactgggctgcccaggagccccatagacacagcattttcactccagagacaaatccacgggcgggtctggaaaaaaattactgccgtaaccctgatggtgatgtaggtggtccctggtgctacacgacaaatccaagaaaactttacgactactgtgatgtccctcagtgtgcggccccttcatttgattgtgggaagcctcaagtggagccgaagaaatgtcctggaagggttgtaggggggtgtgtggcccacccacattcctggccctggcaagtcagtcttagaacaaggtttggaatgcacttctgtggaggcaccttgatatccccagagtgggtgttgactgctgcccactgcttggagaagtccccaaggccttcatcctacaaggtcatcctgggtgcacaccaagaagtgaatctcgaaccgcatgttcaggaaatagaagtgtctaggctgttcttggagcccacacgaaaagatattgccttgctaaagctaagcagtcctgccgtcatcactgacaaagtaatcccagcttgtctgccatccccaaattatgtggtcgctgaccggaccgaatgtttcatcactggctggggagaaacccaaggtacttttggagctggccttctcaaggaagcccagctccctgtgattgagaataaagtgtgcaatcgctatgagtttctgaatggaagagtccaatccaccgaactctgtgctgggcatttggccggaggcactgacagttgccagggtgacagtggaggtcctctggtttgcttcgagaaggacaaatacattttacaaggagtcacttcttggggtcttggctgtgcacgccccaataagcctggtgtctatgttcgtgtttcaaggtttgttacttggattgagggagtgatgagaaataattaattggacgggagacagagtgacgcactgactcacctagaggctgggacgtgggtagggatttagcatgctggaaataactggcagtaatcaaacgaagacactgtccccagctaccagctacgccaaacctcggcattttttgtgttattttctgactgctggattctgtagtaaggtgacatagctatgacatttgttaaaaataaactctgtacttaactttgatttgagtaaattttggtttt

SEQ ID NO: 76 - DNA, 1024 bp, Homo sapiens
ccccacccgaaacacactcagcccttgcactgacctgccttctgattggaggctggttgcttcggataatgacctccaggaccccactgttggttacagcctgtttgtattattcttactgcaactcaagacacctgcagcagggcgtgagaaaaagtaaaagaccagtattttcacattgccaggtaccagaaacacagaagactgacacccgccacttaagtggggccagggctggtgtctgcccatgttgccatcctgatgggctgcttgccacaatgagggatcttcttcaatacatcgcttgcttctttgcctttttctctgctgggtttttgattgtggccacctggactgactgttggatggtgaatgctgatgactctctggaggtgagcacaaaatgccgaggcctctggtgggaatgcgtcacaaatgcttttgatgggattcgcacctgtgatgagtacgattccatacttgcggagcatcccttgaagctggtggtaactcgagcgttgatgattactgcagatattctagctgggtttggatttctcaccctgctccttggtcttgactgcgtgaaattcctccctgatgagccgtacattaaagtccgcatctgctttgttgctggagccacgttactaatagcaggtaccccaggaatcattggctctgtgtggtatgctgttgatgtgtatgtggaacgttctactttggttttgcacaatatatttcttggtatccaatataaatttggttggtcctgttggctcggaatggctgggtctctgggttgctttttggctggagctgttctcacctgctgcttatatctttttaaagatgttggacctgagagaaactatccttattccttgaggaaagcctattcagccgcgggtgtttccatggccaagtcatactcagcccctcgcacagagacggccaaaatgtatgctgtagacacaagggtgtaaaatgcacgtttcagggtgtgtttgcatatgatttaatc

SEQ ID NO: 77 - DNA, 186 bp, Homo sapiens
atggatcccaactgctcctgtgccgccagtgactcctgcacctgcgccggctcctgcaagtgcaaagagtgcaaatgcacctcctgcaagaaaagctgctgctcctgctgtcctgtgggctgtgccaagtgtgcccagggctgcatctgcaaaggggcgtcggacaagtgcagctgctgtgcctga

SEQ ID NO: 78 - DNA, 519 bp, Homo sapiens
tccgaggggcgctccccgcctcccccaggaagaacactcgctcccggccatacttgcgtgtgagttctgacccctggaggagccactgtggaagcagagcaatcgccatggagtttgtgatgaagcaggctctaggaggggccaccaaggacatggggaagatgctggggggtgacgaggagaaggacccagacgccgccaagaaggaggaggagcggcaggaggcgctgcgccaggcggaggaggagcgcaaggccaagtacgccaagatggaggcggagcgcgaggccgtgcgccagggcatccgagacaagtacggcatcaagaagaaggaggagcgcgaggccgaggcccaggccgccatggaggccaactccgaggggagcttgacgcggcccaagaaggccatcccgccgggctgcggggacgaggtggaggaggaggacgagagcatcctggacaccgtcatcaagtacctgcccgggccgctgcaggacatgctcaagaagtagccccgcg

SEQ ID NO: 79 - DNA, 916 bp, Homo sapiens
aggaggcagtagttccccgcttcccttccgcgggaggggagatagctagccatccaagaaaacaccatgaaagataacgatatcaagagactactgtatacccatcttttatgcatattttcaattatcctaagtgtcttcattccatcactcttcttggagaacttctcaatattggaaacacacttgacatggttgtgcatctgttctggttttgtaactgctgtcaatctagtactatatttagtagtgaaaccaaatacatcctctaaaagaagttcattatcacacaaggtaactggatttttgaaatgctgtatctactttcttatgtcttgtttctcctttcatgtaatttttgttctgtatggagcaccactgatagagttggcgttggaaacatttttatttgcagttattttgtctacttttactactgtgccttgcttatgtttgttaggaccaaacctcaaagcatggctaagagtgttcagtagaaatggagttacatccatatgggagaatagtctccagatcactacaatttctagctttgtaggagcatggcttggagcacttcctattccactggattgggaaagaccatggcaggtatggcccatctcctgtacgcttggagcgacctttggctacgtggctggccttgttatttcaccactctggatatactggaatagaaagcaacttacatacaagaacaattaactggagcaaagggagatatttctttgtgcagattctgtaagggctgggcagaaatgtgtatggtcaaagccaagcagttccatttacagctctgttttttacgtagttacaacatgatgtgattgtagctttttaaactatgaaacccctgagagattgtaccttctagttgaaataaagtatttataat

SEQ ID NO: 80 - DNA, 7572 bp, Homo sapiens
gcgcggaggcagggaaccggagccttggagcgacccaacccctcgtctcgctgccctcccgcgcctgcaacggtgcgcggagactccggcgaactcagacacccaacggcggagaacagaagcggcaggcggcggacgtggccgcgaagctgcgcgccgaacgcagcgcacccgctgccgagcagaggagccgcgcctttccccgaccctcggctccagcccccggcgcctgccgcctcgcagcccctctgcgtcctcggctcgggggccggcaccggcgatgccgagcggagcctccagtcctccgacccgctgaagaagcagcagccgctcgcccggagcctacggggattgtgcgagcggatcgtgctcggtggaggctcgggctgcggggcgcggggactccggggggcggggggagggaccgctctgtcggtgcccggcgccagccgcggctttgaagggtctccctcccctgcccttagcagctctgccacggactccgggaggctgcgggcggcgtcctgagggctccccagcagacccaatcggacttgagaaggtgatcgctctgctctcccaacccccttccctccccattccccccacttaactttttgtctccgttcatccgcggcttcgtcccctccccgcagacccacccgcggctgtgacaaccgcccggggcatgggccccccaacacggctcctagaggccccgcggcctcgcaagatgtgagaggccctccccgggcagaatcggagcttcaggagaggagctaataccccgccccccgtccctcacatcaggcggggtggaggtgcgcgctgagcccccgcggtgctgagcgtcccggagcgcccaatcctgggctggaacgagtagctggccggaggcgcgccgcggagagccggctgtcatgccctattgatccccctctgccccccgccaagtatgtttgggctggaccaattcgagccccaggtcaacagcaggaacgctggccagggcgagaggaactttaacgagaccggactgagcatgaacacccactttaaggccccggctttccacactggggggccccctggccctgtggatcctgctatgagcgcgctgggcgaacccccgatcttgggcatgaacatggagccctacggcttccacgcgcgcggccactcggagttgcacgcaggggggctgcaagcgcagcctgtgcacggcttctttggcggccagcagcctcaccacggccacccgggaagtcatcatccccaccagcatcacccccactttgggggcaacttcggtggcccggaccccggggcctcgtgcctgcacgggggtcgcctgctcggctacggcggcgcagccggaggcctgggcagccagccgcccttcgccgagggctatgagcacatggcggagagccaggggcctgagagcttcggcccgcagcgaccggggaacctcccggacttccacagttcaggtgcctccagccacgccgtgccggccccatgcctgccgctggaccagagccctaaccgagccgcctccttccacggcctgccgtcctccagcggctccgattcccacagtctggagccacggagggtgacgaaccaaggagccgtcgactcgctggaatacaattacccgggcgaggcgccctcgggacattttgacatgttttcgccctctgactccgaagggcagctgcctcattatgcagcgggtcgccaggttcctgggggcgctttcccgggcgcctcggccatgcccagagctgcgggcatggtgggcttgtccaaaatgcacgcccagccaccgcagcagcagccccagcagcagcagcagccccagcagcagcagcagcagcatggtgtgttctttgagaggttcagtggggccagaaagatgcctgtgggtctggagccctcagtgggctccaggcacccgttaatgcagcctccccagcaggccccgccaccccctcagcagcagcccccgcagcagccgccacagcagcagccgccgccgccacccgggcttctagtccgacaaaattcgtgcccgcctgcgctccctcggccccagcagggcgaggcgggcacgcccagcggcggcctgcaggacggaggccccatgctgcccagccagcacgcgcaattcgagtatcccatccaccggctggagaaccggagcatgcacccttattccgagcctgttttcagcatgcagcatcctcctccgcagcaggcgcccaaccagcggctgcagcatttcgacgcgcccccctacatgaacgtggccaagaggccgcgcttcgactttccgggcagcgcgggagtggaccgctgcgcttcgtggaacggcagcatgcacaacggcgctctggataatcacctctccccttccgcctacccaggcctacccggcgagttcacaccgcctgtgcccgacagcttcccttcggggccgcccctgcagcatccggccccggaccaccagtccctgcaacagcagcagcagcagcagcagcagcagcaacagcagcagcagcagcagcaacagcaacagcaacagcagcagcagcagcagcgccaaaacgcggccctcatgattaagcagatggcgtcgcggaatcagcagcagcggctgcgccagcccaacctggctcagctaggccaccccggggacgtgggccagggcggcctggtgcatggcggcccggtgggcggcttggcccagccgaactttgagcgcgaaggcggcagcacgggcgccgggcgtctgggcaccttcgagcagcaggcgccgcacttggcgcaagagagcgcgtggttctcaggtccgcatccgccgcccggagacctgctgccccgtaggatgggcggctcgggtctgcccgctgactgtggcccgcacgaccccagcctggcgccccctcctccgcctggtggctcgggggtgctgttccggggccctctgcaggagccgatgaggatgcccggagagggccacgtgcccgcgctgccttcaccgggcctgcagttcgggggcagtctgggaggcctgggtcagctgcagtcgcccggggcgggcgtggggctccccagcgctgcttcggagcgccggcccccgccgccggactttgctacgtctgcgctcgggggccagccgggctttccgtttggtgcagccggccggcagtccacgccgcacagcggtccaggcgtgaactcgccccccagcgcgggagggggcggtggcagctctggtggcggcggtggcgggggtgcctacccgccgcagcctgatttccagcccagccagcgcacctcggccagtaaattgggcgcgctctcgctgggctccttcaacaagcccagctccaaggacaacctgttcggccagagctgcctggctgcgctctccaccgcttgccagaacatgatcgccagcctcggggcccccaacctcaacgtgaccttcaacaagaagaacccgccagagggcaagaggaaactgagccagaacgagaccgacggcgcggcagtggccggcaacccgggctcggattacttcccaggagggactgctcctggggccccaggacccggaggcccgtccgggaccagtagcagcggctccaaagcctcggggccgcccaaccctccagcccagggggacggcaccagcctctcccccaactacaccctggaatccacgtcggggaatgacggcaagccggtctccgggggcggcggccggggacggggtcgcagaaaaagggacagtggtcacgtgagccctggcaccttctttgacaagtactcggcggctccggacagcgggggcgcacctggggtgagcccagggcagcagcaagcgtcaggcgcagccgtcgggggaagctccgcaggcgagacgcgcggggcaccgacgccccacgaaaaggcgctcacgtcgccatcctgggggaagggggctgagttgctcctgggggatcagccggacctcattgggtccctggacggcggggccaagtcggacagtagttcgccaaacgtgggtgagttcgcctcggacgaggtgagcacgagctacgccaatgaggacgaggtgtcgtccagctctgacaacccccaggcactagttaaagcgagcaggagtcccctggtgaccggctcgcccaaactccctccccgtggggtaggcgccggggaacacggaccgaaggcgcccccgcccgccctcggcctgggcatcatgtctaactctacctcgacccctgacagctacggcggcggtgggggcccgggccatccgggcactccgggcctggagcaggtccgcaccccgacgagcagcagcggcgccccgccacccgacgagatccaccccctggagatccttcaggcgcagatccagctacagaggcagcagttcagcatctccgaggaccagcctctggggctgaagggtggcaagaagggttgagtgcgccgtcggggcctcaggggcgcagaatgggcgacagcgagctgggcagctgctgctccgaggcggtcaagagcgccatgagcaccattgacctggactcgctgatggcagagcacagcgctgcctggtacatgcccgctgacaaggccctggtggacagcgcggacgacgacaagacgttggcgccctgggagaaggccaaaccccagaaccccaacagcaaagaagcccacgacctccctgcaaacaaggcctcagcatcccagcctggcagccacttgcagtgcctgtctgtccactgcacagacgacgtgggtgacgccaaggctcgagcctccgtgcccacctggcggtccctgcattctgacatctccaacagatttgggacattcgtggctgccctaacttgaatgacaagaaagatcccctcctctaccaggcccttcctctccccctgtctgtttccttccccctcaaccttaccccacccctctgttaatttgaaagggccactattgctgagtggatgagttttttttttttcctctaggttggtacctgcttagtggcatatggaccggaaagggttaatttaaagggggggaacctcaaaagtttttttaaaaaagaaacttgtctgccacagtatgttaccagtgttaacccttctgcagttagcaaacttttgcttaagcctttttcctctagatactccccatgtttcggtaatcttggcatacattttttagatgacctctttccttgttttgttttcatgctgctgtatgtccaagtattgttatttcataataagacaagagttgctttcttttttattctttttccttttcttaccccctccccttttattttctttttgctttgttcactgcttattaaaatggaaatcctggagaatagtagttctggaatattgccgggtgaaagtccaattgtcatcacaatgttatatattgacaccccagtgtcatcagtcaggcaggagccaaacaatgaatgcccctcttaggtattccgcctgggattttgttttgtctgttccctaagaaaatatattttcattcctgcaaacacagtgctcagccttcagttcccttccacttgagttctctcttctcctgctggaagccgcccctctctgcgatggacgtgaggacgtgtccagctctgctctgtgggaaggagttggaatgttcgacagcagtgttttctctccttttctgggcctcctcgcaaatgcccaggccctgcattttcacgctgtgctaagcagcctttggtctgcatgggggatggtgtgctcccagcctgcagtctttggagcaaggctgctgcccgtgccttgggtgctggagttggaggaggctgttctcagccctttcccttttctgaaagctgttcctggccgggcatcccagggaagaaggaggggactgcgtgtatctcctccacctctcccattccatccccagtccagcctgggcaaccccacccctgggagggatgaggcaccctcttgctcagcctgctcagccttctctgagcctttgcagggatctgcagactcctgagggctagaggacagagaaagagaatagaatgaaatgactttgattcctgcgccttttagttttgaactctggaattcctctgccccctccccaacatttttttggaatctcaccctgttgcaaaactagagccatgtcccaagcatctcacaaaggaataactgctctgagcagagatgagtggtggttggcaggggcaggcaactttgggtgctgctgatgcctgcaaaagccatttatggcttgtggtggggggcacatagattccccggtgggttagacaggaagtaactgatatcacttcacccaaatatataaccgtgatggttatctatttaatttcagtttttgttaacgagcgtgtcttactaaaacgctccactttgagctcccccaccccctccaggtcctcagagtttgcagatctgggctttctaaagcaagtgacctgaaggctctgggctcaccatacaacacccacgttgtttatttcaaagaacttttcagcgaagggagaggagctttcagaaaaacctcactctttcccctcccttctcccctctttccttctgccggtccttttggctggggtctgagtctgcggttctcgcctgggcagtcttgacgaggagcaaaccccgccttcagagggcagacaaagcaggtggcatgaattgatcagcgagaaaggtgtgagccgaggcagttcctgcgttctgctacaaaaggaatggaaagggaagggaatttccccccaccatgggctgtgggagagttgaccgtattctgggcaagactccatgacccctctgattctgcagtgtacagctgtttgagagcctcatcattttacttttgaaacaggaatgatttctccttaattgcttaaggccggggagcaaagtgtcttaacttctgtctttgactttcccagcgttgagtcatcaacactttgccaattagctcatggtcctggcaacctcagaaacccctgaagttttaaaaactttctcgctccccacgaccccagaatgaaacagctttaaaaatagccttaagcaaaaggatgttatttcattaaatttggtttaatggaaagaataaaagtaaatgaaaaacacaccctacacactagactccgaacactggtaatcagtactgcatagcaaactctttgggaaagaaaacgaaaatgttattgcacatgtaaaatatgaaaacttaactctgctgtgtgttaggcaatcctgtaatcttttttgactcttaaaagaaattcatttctgaaatgcttggttggaagactgtgacaatagctcatgaaattgagtgttatttttttctttcttttttaaaaaaatatgtaaagtgcagtcttctgtattcctgcatattgtatatacctgtatatgttttcctgagcagttaaataacaataaatatgacgttaatggtgaaaaaaaaaaaaaa

SEQ ID NO: 81 - DNA, 1824 bp, Homo sapiens
gctttaagccggcgccggggccaggcggggcagtcccgggccggcccgtaccgccaggcgatcgcgctgatggcggcgctggcagcagcggccaagaaggtgtggagcgcgcggcggctgctggtgctgctgttcacgccgctcgcgctgctgccggtggtcttcgccctcccgcccaaggaaggccgctgcttgtttgtcatcctgctcatggcggtgtactggtgcacggaggccctgccgctctcagtgacggcgctgctgcccatcgtcctcttccccttcatgggcatcttgccctccaacaaggtctgcccccagtacttcctcgacaccaacttcctcttcctcagtgggctgatcatggccagcgccattgaggagtggaacctgcaccggcgaatcgccctcaagatcctgatgcttgttggagtccagccggccaggctcatcctggggatgatggtgaccacctcgttcttgtccatgtggctgagcaacaccgcctccactgccatgatgcttcccattgccaatgccatcctgaaaagtctctttggccagaaggaggttcgaaaggaccccagccaggagagtgaagagaacacagctgctgtgcggagaaacggcctacacactgtgcccacggagatgcagtttctcgccagcacagaagcgaaggaggatgaatatcgtcggaacatctggaagggcttcctcatctccatcccctactcagccagtattgggggcacagccacactcacgggcacagcccctaacctcatcctgcttggccagctcaagagtttctttccgcagtgtgacgtggtgaatttcggctcctggttcattttcgccttccctcttatgctgttgttcctgttggcaggctggctctggatctccttcctgtacgggggactgagcttcaggggctggaggaagaataaatctgagataagaaccaatgcagaagatagggctcgagctgtaattcgggaagaataccagaacctggggcccatcaagtttgccgaacaggctgttttcatccttttctgcatgtttgccatcctcctcttcacccgggacccgaagttcatccctggctgggccagcctcttcaatcctgggtttctttctgatgctgtcaccggcgtggctattgtcaccatcttgttcttcttcccgtcccaaaggccctctctcaagtggtggtttgacttcaaagctcccaacacagagacagagcccttgctgacctggaagaaggcccaggagacagtgccttggaacatcatccttctcctgggagggggcttcgccatggccaaaggctgtgaggaatcggggctgtctgtatggattggtgggcagctgcaccccctggagaatgtgccccccgccctggctgtgctgctcatcactgtggtcatcgccttcttcactgagtttgccagcaacacggcgaccatcatcatcttcctgccggtcctggcagagctggccatccgcctgatagtgcaccccctgtatctgatgattccgggcacagtcggctgctcctttgccttcatgctcccggtctcaacgccccccaactccatcgccttcgcctctggacacttgctggtcaaagacatggtgcggacaggcctcctgatgaacctgatgggtgtcctgctgctcagtttggctatgaatacctgggcacagaccatcttccagctgggcaccttcccggactgggctgatatgtactcggtcaatgtcacagcattgccacccaccttggccaatgacacatttcggaccctctga

SEQ ID NO: 82 - DNA, 2638 bp, Homo sapiens
tgggaacacaaacttgctggcgggaagagcccggaaagaaacctgtggatctcccttcgagatcatccaaagagaagaaaggtgacctcacattcgtgccccttagcagcactctgcagaaatgcctcctcagctgcaaaacggcctgaacctctcggccaaagttgtccagggaagcctggacagcctgccccaggcagtgagggagtttctcgagaataacgctgagctgtgtcagcctgatcacatccacatctgtgacggctctgaggaggagaatgggcggcttctgggccagatggaggaagagggcatcctcaggcggctgaagaagtatgacaactgctggttggctctcactgaccccagggatgtggccaggatcgaaagcaagacggttatcgtcacccaagagcaaagagacacagtgcccatccccaaaacaggcctcagccagctcggtcgctggatgtcagaggaggattttgagaaagcgttcaatgccaggttcccagggtgcatgaaaggtcgcaccatgtacgtcatcccattcagcatggggccgctgggctcacctctgtcgaagatcggcatcgagctgacggattcgccctacgtggtggccagcatgcggatcatgacgcggatgggcacgcccgtcctggaagcactgggcgatggggagtttgtcaaatgcctccattctgtggggtgccctctgcctttacaaaagcctttggtcaacaactggccctgcaacccggagctgacgctcatcgcccacctgcctgaccgcagagagatcatctcctttggcagtgggtacggcgggaactcgctgctcgggaagaagtgctttgctctcaggatggccagccggctggccaaggaggaagggtggctggcagagcacatgctggttctgggtataaccaaccctgagggtgagaagaagtacctggcggccgcatttcccagcgcctgcgggaagaccaacctggccatgatgaaccccagcctccccgggtggaaggttgagtgcgtcggggatgacattgcctggatgaagtttgacgcacaaggtcatttaagggccatcaacccagaaaatggctttttcggtgtcgctcctgggacttcagtgaagaccaaccccaatgccatcaagaccatccagaagaacacaatctttaccaatgtggccgagaccagcgacgggggcgtttactgggaaggcattgatgagccgctagcttcaggcgtcaccatcacgtcctggaagaataaggagtggagctcagaggatggggaaccttgtgcccaccccaactcgaggttctgcacccctgccagccagtgccccatcattgatgctgcctgggagtctccggaaggtgttcccattgaaggcattatctttggaggccgtagacctgctggtgtccctctagtctatgaagctctcagctggcaacatggagtctttgtgggggcggccatgagatcagaggccacagcggctgcagaacataaaggcaaaatcatcatgcatgacccctttgccatgcggcccttctttggctacaacttcggcaaatacctggcccactggcttagcatggcccagcacccagcagccaaactgcccaagatcttccatgtcaactggttccggaaggacaaggaaggcaaattcctctggccaggctttggagagaactccagggtgctggagtggatgttcaaccggatcgatggaaaagccagcaccaagctcacgcccataggctacatccccaaggaggatgccctgaacctgaaaggcctggggcacatcaacatgatggagcttttcagcatctccaaggaattctgggagaaggaggtggaagacatcgagaagtatctggaggatcaagtcaatgccgacctcccctgtgaaatcgagagagagatccttgccttgaagcaaagaataagccagatgtaatcagggcctgagtgctttacctttaaaatcattccctttcccatccataaggtgcagtaggagcaagagagggcaagtgttcccaaattgacgccaccataataatcatcaccacaccgggagcagatctgaaaggcacactttgatttttttaaggataagaaccacagaacactgggtagtagctaatgaaattgagaagggaaatcttagcatgcctccaaaaattcacatccaatgcatagtttgttcaaatttaaggttactcaggcattgatcttttcagtgttttttcactttagctatgtggattagctagaatgcacaccaaaaaaatacttgagctgtatatatatgtgtgtgtgtgtgtgtgtgtgtgtgtgtgtgtgcatgtatgtgcacatgtgtctgtgtggtatatttgtgtatgtgtatttgtatgtactgttattgaaaatatatttaatacctttggaaaaatcttgggcaagatgacctactagttttccttgaaaaaaagttgctttgttattaatattgtgcttaaattatttttatacaccattgttccttacctttacataattgcaatatttcccccttactacttcttggaaaaaaattacaaaatgaagttttatagaaaag

SEQ ID NO: 83 - DNA, 1919 bp, Homo sapiens
gaactagctggtccccaaatgaccctggatttttctcccggcttatagcttgtgcctggggccacacaaagccagtggaccttggagggcaggatgtgagaaactgttccaccaaccccccttaccttccagttactgtggtcaataccacaatgtcactcacagccctccgccagcagatgcagacccagaatctctcagcctacatcatcccaggcacagatgctcacatgaacgagtacatcggccaacatgacgagaggcgaactgcagtggtgactatgaagaaagcagctgtctggaccgacagtcgctactggactcaggctgagcggcagatggactgcaactgggagctccataaggaagttggcaccactcctattgtcacctggctcctcaccgagattcctgctggagggcgtgtgggttttgaccccttcctcttgtccattgggagcacttggcaggagaaagtatctggcgtccgaagccagatgcagaagcatcaaaaggtcccgactgccgtccttctgtcggcgcttgaggagacggcctgtgagtgtggatttgcagacatggggctcttcaaccttcgagccagtgacatcccctataaccccttcttctattcctacacgctgctcacagactcttctattaggttgtttgcaaacaagagtcgctttagctccgaaaccttgagctatctgaactccagttgcacaggccccatgtgtgtgcaaatcgaggattacagccaagttcgtgacagcatccaggcctactcattgggagatgtgaggatctggattgggaccagctataccatgtatgggatctatgaaatgatacccaaggagaaactcgtgacagacacctactccccagtgatgatgaccaaggcagtgaagaacagcaaggagcaggccctcctcaaggccagccacgtgcgggacgctgtggctgtgatccggtacttggtctggctggagaagaacgtgcccaaaggcacagtggatgagttctcgggggcagagatcgtggacaagttccgaggagaagaacagttctcctccggacccagttttgaaaccatctctgctagtggtctgaatgctgccctggcccactacaggtacttgaggaaaaagaattttctagggccctgttggggcatcctgttgtcccgaccaagggagctgaaccgcaagctgtcctcagatgagatgtacctgctggactctggggggcagtactgggacgggaccacagacatcaccagaacagtccactggggcaccccctctgccttccagaaggaggcatacacccgtgtgctgataggaaatattgacctgtccaggctcatctttcccgctgctacatcagggcgaatggtggaggcctttgcccgcagagccttgtgggatgctggtctcaattatggtcatgggacaggccacggcattggcaacttcctgtgtgtgcatgagtggccagtgggattccagtccaacaacatcgctatggccaagggcatgttcacttccattgaacctggttactataaggatggagaatttgggatccgtctcgaagatgtggctctcgtggtagaagcaaagaccaagtacccagggagctacctgacctttgaagtggtatcatttgtgccctatgaccggaacctcatcgatgtcagcctgctgtctcccgagcatctccagtacctgaatcgctactaccagaccatccgggagaaggtgggtccagagctgcagaggcgccagctactagaggagttcgagtggcttcaacagcacacagagcccctggccgccagggccccagacaccgcctcctgggcctctgtgttagtggtctccacccttgccatccttggctggagtgtctag

SEQ ID NO: 84 - DNA, 993 bp, Homo sapiens
atggatcccaactgctcctgcaccacaggtggctcctgtgcctgcgccggctcctgcaagtgcaaagagtgcaaatgtacctcctgcaagaagtgtgtctcctgcacctgcgctggttcctgcaagtgcaaagagtgcaaatgcacctcctgcaagaagagtgagtgtgaggccatctccatgggcagcaaagtgactggagatgtggaggaaagcgtcatctcagcaacgcagagtcatgagaaggactgggtgcagatgaaggatgttgagtgtgctgatgcagtggtgatggcatattctgcagttggaaggagctggcgcaggtgcaggagacacctgcaagaagagaaaaagccagtgagcgaaaaggagctgccaactgttgcgctccaccacgccctccacgtgttccactgcctcttctcttctcgcttgggaactccagtctcacctcggcttgcaatggaccccaactgctcctgcgaggctggtggctcctgcgcctgcgccggctcctgcaagtgcaaaaagtgcaaatgcacctcctgcaagaagagtgagtgcggggccatctccaggaatctggggctgtggctaaggctgctgctcctgttgccccctgggctgtgccaagtgtgcccagggctgcatctgcaaaggggcgtcagagaagtgcagctgctgtgcctgatgtcgggacagccctgctgctgctgctcctgctgccccgtgggctgtgccaagtgtgcccagggatgtgtttgcaaagggacactgacaagtgcagctgctgctcctgatgtagggaaagctgtgttcccagaagtagaaattggctcctgtgcctgtgccggctcctgcaaatgcaaagagtgcaaatgcacctcctgcaagaagagctgctgctcctgctgccctgtgggctgtgccaagtgtgcccagggctgcatctgcaaagggacgtcagacaagtgcagctgctgtgcctga

SEQ ID NO: 85 - DNA, 1476 bp, Homo sapiens
gggccggggccgcagctggctcggataaatagccgcccggctggcccggagctgcaggggagagcggcggccgcgatccccaccacaccaccagcccggccgcacggggcactgagccgggtgctgagcaccggaggccccgccgaggccgggactcagtttttgtgttacggatccccactagctgttggagtcctgtacatagaatggctggatgcctttggtgaaggaaaaggaaaaacagcctgggttggatccctggcaagtggagttggcttgcttgcaagtcttggatgtggtttattatacactgcaacagtgaccattacgtgccagtattttgacgatcgccgaggcctagcgcttggcctgatttcaacaggttcaagcgttggccttttcatatatgctgctctgcagaggatgctggttgagttctatggactggatggatgcttgctgattgtgggtgctttagctttaaatatattagcctgtggcagtctgatgagacccctccaatcttctgattgtcctttgcctaaaaaaatagctccagaagatctaccagataaatactccatttacaatgaaaaaggaaagaatctggaagaaaacataaacattcttgacaagagctacagtagtgaggaaaaatgcaggatcacgttagccaatggtgactggaaacaagacagcctacttcataaaaaccccacagtgacacacacaaaagagcctgaaacgtacaaaaagaaagttgcagaacagacatatttttgcaaacagcttgccaagaggaagtggcagttatataaaaactactgtggtgaaactgtggctctttttaaaaacaaagtattttcagcccttttcattgctatcttactctttgacatcggagggtttccaccttcattacttatggaagatgtagcaagaagttcaaacgtgaaagaagaagagtttattatgccacttatttccattataggcattatgacagcagttggtaaactgcttttagggatactggctgacttcaagtggattaataccttgtatctttatgttgctaccttaatcatcatgggcctagccttgtgtgcaattccatttgccaaaagctatgtcacattggcgttgctttctgggatcctagggtttcttactggtaattggtccatctttccatatgtgaccacgaagactgtgggaattgaaaaattagcccatgcctatgggatattaatgttctttgctggacttggaaatagcctaggaccacccatcgttggttggttttatgactggacccagacctatgatattgcattttattttagtggcttctgcgtcctgctgggaggttttattctgctgctggcagccttgccctcttgggatacatgcaacaagcaactccccaagccagctccaacaactttcttgtacaaagttgcctctaatgtttag

SEQ ID NO: 86 - DNA, 2532 bp, Homo sapiens
agggagagaactctggaggaacgctgagctgagcagcaccgaggacagcgcccggcagcgcccgcgcccaggtctccctccgcagccctgactcgcgcacacgctgagcttttgctcactccccctcgcgcggacacagacacacgcatattcacacacccagacacacacccccgctgtacaatggcagaatcccacctgcagtcatccctcatcacagcctcacagtttttcgagatctggctccatttcgacgctgacggaagtggttacctggaaggaaaggagctgcagaacttgatccaggagctccagcaggcgcgaaagaaggctggattggagttatcacctgaaatgaaaacttttgtggatcagtatgggcaaagagatgatggaaaaataggaattgtagagttggctcacgtattacccacagaagagaatttcctgctgctcttccgatgccagcagctgaagtcctgtgaggaattcatgaagacatggagaaaatatgatactgaccacagtggcttcatagaaactgaggagcttaagaactttctaaaggacctgctagaaaaagcaaacaagactgttgatgacacaaaattagccgagtatacagacctaatgctgaaactatttgattcaaataatgatgggaagctggaattaactgagatggccaggttactaccagtgcaggagaattttcttcttaaattccagggaatcaaaatgtgtgggaaagagttcaataaggcttttgagctgtatgatcaggacggcaatggatacatagatgaaaatgaactggatgctttactgaaggatctgtgcgagaagaataaacaggatctggatattaataatattacaacatacaagaagaacataatggctttgtcggatggagggaagctgtaccgaacggatcttgctcttattctctgtgctggggataactagagttggtggccgcaaccacttgctagtgatacactgtatctaaaaaataactgtgcactataagggagtaggctgtattttcttttatatctgtaaatttaactgcatatagataattatccaggatgtgtggctcattcttttcagcttgtttctatactgtttgtaatatacagtttttgtaaccatatgattgaaaagaagaaagtctatgcttaggccagtcagtacacccaattttaaaaaataacatattcttgctttcacaaatatagttgaacaagatttccctaaaaattccaccaggattaatctctaaaattctagtctctgatttgcaaatgcacatttgtcactgaataatggaattatgtataacaagccaaacattcttattttagacaaccatagaactgtcccacaaaatatttctaagcttatttctaactattaggaggaatgtgcttttccatctaaaatactcaccaaaatatagttaattgtggctttatgaagttaacagtctcattacagatttagtttaccaatcaacagcatgtctactgcttggatccatacaaaactatcggttcaagttgatgtgacaagggaagggagcaccagatgacacataaatctgtctgattctatgcctgtatttccaacaaacttactgtcagagaatatgacctaaatccattttctaaactgttttcatgtgttgcaaattattctagtcaactgctgttttatgtcatactctgtgtaatctctgattaaatttaatatactgcatatcctggtgtctagtttgcatacttcctggattttctttctatgtagaactgttcatttccaccaagggtatctgctgcctctgaaaatatttttttctagctataacaactctattttttactacataattaaattttaatgtaaaattcatagcatcctgattattgaatgttatatcatcaatacttttgtgtattctgtggattctatatttcatattgagatcagcattcaaaatagttctatttctatctgcaaatagtttcaaatgagtttaaaaaaataacatctgaaaagaaatgctaatgtaatcatttatcttatctagcaagaagattctaaaacattctttaacatacatctaagtcagtttcacatatttgtagctagaatatcctatactggttatagttgatatgtaacagttggtgattttagatttctttgattgtgaaacagggagctatgagagatgtgtccatgtgaaatttacagttactgcctaggagttaatgatcgttctgggtcagcttgaatgtccccattctataaattcaacacttattttctgaattcataaaaataaccaaaaaatgtgagctataatgtttccctcaagaacaaacagaaacgagatttgccaaaaactaaaattcaacaaatgatgttgagtgggagattggctttgcctttagcgtgtaaatggaagcactgccattagactgaatttaactactaagaataaataaagaagaaaataacctt

SEQ ID NO: 87 - DNA, 1506 bp, Homo sapiens
atggcggcgctattggcggcggcggcagtgcgagcccggatcctgcaggcgagtttcttccaaggtgaaatccagtcccacctggccaccaatgaggtcattggtcgggtccctcaggccaccaaggcagaaatggatgcagccattgcttcctgcaaacgtgcttttcctgcatgggcagacacttcagtattaagccgccagcaggtcttgctccgctatcaacaacttattaaagaaaacttgaaagaaattgccaagttaatcacattggaacaagggaagaccctagctgatgctgaaggagatgtatttcgaggccttcaggtggttgagcatgcctgtagtgtgacatccctcatgatgggagagaccatgccatccatcaccaaagacatggacctttattcctaccgtctgcctctgggagtgtgtgcaggcattgctccattcaattttcctgccatgatccccctttggatgtttcccatggccatggtgtgtggaaataccttcctaatgaaaccatctgagcgagtccctggagcaactatgcttcttgctaagttgctccaggattctggtgcccctgatggaacattaaacatcatccatggacagcatgaagctgtaaattttatttgcgatcatccggacatcaaagcaatcagctttgtgggatccaacaaggcaggagagtatatcttcgagagaggatcaagacatggcaagagggttcaagccaatatgggagccaagaaccatggggtagtcatgccagatgccaataaggaaaataccctgaaccagctggttggggcagcatttggagctgctggtcagcgctgcatggctctttcaacagcagtccttgtgggagaagccaagaagtggctgccagagctggtggagcatgccaaaaacctgagagtcaatgcaggagatcagcctggagctgatcttggccctctgatcactccccaggccaaagagcgagtctgtaatctgattgatagtggaacaaaggagggagcttccatccttcttgatggacgaaaaattaaagtgaaaggctatgaaaatggcaactttgttggaccaaccatcatctcgaatgtcaagccaaatatgacctgttacaaagaggagatttttggtccagttcttgtggttctggagacagaaacattggatgaagccatccagattgtaaataacaacccatatggaaatggaactgccatcttcaccaccaatggagccactgctcggaaatatgcccacttggtggatgttggacaggtgggagtgaatgtccccattccagtgcctttgccaatgttctcattcaccggctctcgatcctccttcaggggagacaccaatttctatggcaaacagggcatccaattctacactcagttaaagaccattacttctcagtggaaagaagaagatgctactctttcctcacctgctgttgtcatgcctaccatgggccgttag

SEQ ID NO: 88 - DNA, 1806 bp, Homo sapiens
ttttacagaggcctttgaaattgttgttcgccatgccaagaactacaccaatgccatgttcaagaacaactacccaagcctgactccacaagcttttgagtttgtgggtgaatttttcacagatgtgtctctctacatcttgggttctgacatcaatgtagatgacatggtcaatgaattgtttgacagcctgtttccagtcatctatacccagctaatgaacccaggcctgcctgattcagccttggacatcaatgagtgcctccgaggagcaagacgtgacctgaaagtatttgggaatttccccaagcttattatgacccaggtttccaagtcactgcaagtcactaggatcttccttcaggctctgaatcttggaattgaagtgatcaacacaactgatcacctgaagttcagtaaggactgtggccgaatgctcaccagaatgtggtactgctcttactgccagggactgatgatggttaaaccctgtggcggttactgcaatgtggtcatgcaaggctgtatggcaggtgtgttgaagattgacaagtactggagagaatacattctgtcccttgaagaacttgtgaatggcatgtacagaatctatgacatggagaacgtactgcttggtctcttttcaacaatccatgattctatccagtatgtccagaagaatgcaggaaagctgaccaccactattggcaagttatgtgcccattctcaacaacgccaatatagatctgcttattatcctgaagatctctttattgacaagaaagtattaaaagttgctcatgtagaacatgaagaaaccttatccagccgaagaagggaactaattcagaagttgaagtctttcatcagcttctatagtgctttgcctggctacatctgcagccatagccctgtggcggaaaacgacaccctttgctggaatggacaagaactcgtggagagatacagccaaaaggcagcaaggaatggaatgaaaaaccagttcaatctccatgagctgaaaatgaagggccctgagccagtggtcagtcaaattattgacaaactgaagcacattaaccagctcctgagaaccatgtctatgcccaaaggtagagttctggataaaaacctggatgaggaagggtttgaaagtggagactgcggtgatgatgaagatgagtgcattggaggctctggtgatggaatgataaaagtgaagaatcagctccgcttccttgcagaactggcctatgatctggatgtggatgatgcgcctggaaacagtcagcaggcaactccgaaggacaacgagataagcacctttcacaacctcgggaacgttcattccccgctgaagcttctcaccagcatggccatctcggtggtgtgcttcttcttcctggtgcactgactgcctggtgcccagcacatgtgctgccctacagcaccctgtggtcttcctcgataaagggaaccactttcttatttttttctatttttttttttttgttatcctgtatacctcctccagccatgaagtagaggactaaccatgtgttatgttttcgaaaatcaaatggtatcttttggaggaagatacattttagtggtagcatatagattgtccttttgcaaagaaagaaaaaaaaccatcaagttgtgccaaattattctcctatgtttggctgctagaacatggttaccatgtctttctctctcactccctccctttctatcgttctctctttgcatggatttctttgaaaaaaaataaattgctcaaataaaaataaaaaaaaaaaa

SEQ ID NO: 89 - DNA, 966 bp, Homo sapiens
accccgctgctcgggctggagaatagatggttttgtgaaaaattaaacaccgccctgaagaggagccccgctgggcagcggcaggtagcgcagagtgctggcccaggtgctgcagaggtggcgcctccccggcccgggacggtagccccgggcgccaacggcatgacagactcggcgacagctaacggggacgacagggaccccgagatcgagctctttgtgaaggctggaatcgatggagaaagcatcggcaactgtcctttctctcagcgcctcttcatgatcctctggctgaaaggagtcgtgttcaatgtcaccactgtggatctgaaaagaaagccagctgacctgcacaacctagcccccggcacgcacccgcccttcctgaccttcaacggggacgtgaagacagacgtcaataagatcgaggagttcctggaggagaccttgacccctgaaaagagctccaagtctactgattcacagaacactgcatcctccattccaggtacccccaaactggctgcaaaacaccgggaatccaacacagcgggcatcgacatcttttccaagttttctgcctacatcaaaaataccaagcagcagaacaatgctgctcttgaaagaggcctaaccaaggctctaaagaaattggatgactacctgaacacccctctaccagaggagattgacgccaacacttgtggggaagacaaggggtcccggcgcaagttcctggatggggatgagctgaccctggctgactgcaatctgttgcccaagctccatgtggtcaagattgtggccaagaaataccgcaactatgatatcccggctgagatgacaggcctgtggcggtacctcaagaacgcctatgcccgtgatgagttcaccaacacctgtgcagctgacagtgagatcgagttggcctacgctgatgtcgccaaacgcctcagccgatcctga

SEQ ID NO: 90 - DNA, 787 bp, Homo sapiens
gagaaaaaagaaagatcttgatgttccggaaatgccatctattccaaacccttttcctgagctatgctgttctccatttacatctgtgttgtcagcagacctatttcccaaagcaaattcaaggaaaaaacaggtgattaaagtatacagtgaagatgaaaccagcagggctttagatgtacccagtgacataacggctcgagatgtttgtcagctgttgatcctgaagaatcattacattgatgaccacagctggaccctttttgagcacctgcctcacataggtgtagaaagaacaatagaagaccacgaactggtgattgaagtgctatccaactgggggatagaagaagaaaacaaactatactttagaaaaaattatgccaaatatgagttctttaaaaacccaatggaaccgcggcatttgcagtttttcagcgaatttggcaatagtgatatttatgtgtcactggcaggcaaaaaaaaacatggagcaccgactaactatggattctgctttaagagaagtatatcagagaattccctggtagcaatggacttctcaggccagaaaagcagagttatagaaaatcccactgaagccctttcagttgcggttgaagaaggactcgcttggagggtagaagatgacggtgaaatgttccacacactggatgatggccacacaagatttacagatctaatacagctggtggagttctatcaactcaataagggcgttcttccttgcaagttgaaacattattgtgctaggattgctctctag

SEQ ID NO: 91 - DNA, 1587 bp, Homo sapiens
atgtgggtatcctgggctcctggcctgtggctgctcggtctttgggctaccttcggccatggggcaaatacaggtgcacaatgcccaccttcacagcaggaaggactcaaattggaacacagtagtagcctgccagccaacgtgactggcttcaacctcatccaccgactcagcctcatgaagaagtctgccatcaagaagatccgcaaccccaaggggcctctcatcctgcgcctgggggcggcccccgtgacccagcccacgcgacgagtattccctcggggtctcccggaggagtttgccctggtgctgacactactgctgaagaaacacacccaccagaagacgtggtatctgtttcaagtgaccgatgcaaatgggtatccacagatatccctggaagtcaacagccaagagcggagcctggagctcagggcccagggccaggatggcgactttgtgtcctgcatcttcccagtgccccagctcttcgacttgcgttggcacaagctgatgctgagtgtggctggacgtgtggcctctgtgcacgtggactgcagctcagcctcctcccagcctctggggccccgacgacccatgaggcctgtgggccatgtatttctaggcttggatgctgagcagggcaagcctgtctcgtttgaccttcagcaggtgcacatctactgtgacccggagctcgtgctggaggagggctgctgtgagattttaccagcagggtgccccccagagacctccaaggcccgccgggacacccagagcaatgagctcattgagatcaatccacagtctgaaggcaaggtctacacccgctgcttctgcctggaggagcctcaaaacagcgagggagaccctggcatccaaggcatcaaaggagagaagggggagccctgcttgtcctgcagctcggttgtaggggcccagcatcttgtgtcctccacaggggccagtggagatgtgggttcccctggctttggtctgcctggccttccggccccactcctctccccactccctgatcagagtatctgcggggactgtgtccaggggcagagggcccacccagggtacctcgtggagaagggagagaagggagaccagggcatccctgagagaatggcttactacacctccaggatgcagttccccatggagatggcggcagctccgggacgaccagggcctccagggaaggatggtgctccgggcaggccaggtgctccagggtcacctgggctccctggtcagattggcagagaaggacggcagggcttgccaggagtaagaggattgcctggtaccaaaggtgaaaaaggggacattggtattggcattgcaggagaaaatggtcttcccggccccccaggtcctcaaggtcctccaggctatggcaagatgggtgcaacaggaccaatgggccagcaaggcatccctggcatccctgggcccccgggtcccatgggccagccaggcaaggctggccactgtaatccctctgactgctttggggccatgccgatggagcagcagtacccacccatgaaaaccatgaaggggccttttggctga

SEQ ID NO: 92 - DNA, 1888 bp, Homo sapiens
ctgcagttttcacctctgacagagcccagacaccatgaacgcaagtgaattccgaaggagagggaaggagatggtggattacgtggccaactacatggaaggcattgagggacgccaggtctaccctgacgtggagcccgggtacctgcggccgctgatccctgccgctgcccctcaggagccagacacgtttgaggacatcatcaacgacgttgagaagataatcatgcctggggtgacgcactggcacagcccctacttcttcgcctacttccccactgccagctcgtacccggccatgcttgcggacatgctgtgcggggccattggctgcatcggcttctcctgggcggcaagcccagcatgcacagagctggagactgtgatgatggactggctcgggaagatgctggaactaccaaaggcatttttgaatgagaaagctggagaagggggaggagtgatccagggaagtgccagtgaagccaccctggtggccctgctggccgctcggaccaaagtgatccatcggctgcaggcagcgtccccagagctcacacaggccgctatcatggagaagctggtggcttactcatccgatcaggcacactcctcagtggaaagagctgggttaattggtggagtgaaattaaaagccatcccctcagatggcaacttcgccatgcgtgcgtctgccctgcaggaagccctggagagagacaaagcggctggcctgattcctttctttatggttgccaccctggggaccacaacatgctgctcctttgacaatctcttagaagtcggtcctatctgcaacaaggaagacatatggctgcacgttgatgcagcctacgcaggcagtgcattcatctgccctgagttccggcaccttctgaatggagtggagtttgcagattcattcaactttaatccccacaaatggctattggtgaattttgactgttctgccatgtgggtgaaaaagagaacagacttaacgggagcctttagactggaccccacttacctgaagcacagccatcaggattcagtgtttcatttcagcattggcagataccactgggcagaagatttcgctctttgaaaatgtggtttgtatttaggatgtatggagtcaaaggactgcaggcttatatccgcaagcatgtccagctgtcccatgagtttgagtcactggtgcgccaggatccccgctttgaaatctgtgtggaagtcattctggggcttgtctgctttcggctaaagggttccaacaaagtgaatgaagctcttctgcaaagaataaacagtgccaaaaaaatccacttggttccatgtcacctcagggacaagtttgtcctgcgctttgccatctgttctcgcacggtggaatctgcccatgtgcagcgggcctgggaacacatcaaagagctggcggccgacgtgctgcgagcagagagggagtaggagtgaagccagctgcaggaatcaaaaattgaagagagatatatctgaaaactggaataagaagcaaataaatatcatcctgccttcatggaactcagctgtctgtggcttcccatgtctttctccaaagttatccagagggttgtgattttgtctgcttagtatctcatcaacaaagaaatattatttgctaattaaaaagttaatcttcatggccatagcttttattcattagctgtgatttttgttgattaaaacattatagattttcatgttcttgcagtcatcagaagtggtaggaaagcctcactgatatattttccagggcaatcaatgttcacgcaacttgaaattatatctgtggtcttcaaattgtcttttgtcatgtggctaaatgcctaataaacaattcaagtga

SEQ ID NO: 93 - DNA, 627 bp, Homo sapiens
atggcccggctgctgcaggcgtcctgcctgctttccctgctcctggccggcttcgtctcgcagagccggggacaagagaagtcgaagatggactgccatggtggcataagtggcaccatttacgagtacggagccctcaccattgatggggaggagtacatccccttcaagcagtatgctggcaaatacgtcctctttgtcaacgaagagcttgcaccattcggtctggtcattctgggctttccctgcaaccaatttggaaaacaggaaccaggagagaactcagagatccttcctaccctcaagtatgtccgaccaggtggaggctttgtccctaatttccagctctttgagaaaggggatgtcaatggagagaaagagcagaaattctacactttcctaaagaactcctgtcctcccacctcggagctcctgggtacatctgaccgcctcttctgggaacccatgaaggttcacgacatccgctggaactttgagaagttcctggtggggccagatggtatacccatcatgcgctggcaccaccggaccacggtcagcaacgtcaagatggacatcctgtcctacatgaggcggcaggcagccctgggggtcaagaggaagtaa

SEQ ID NO: 94 - DNA, 6600 bp, Homo sapiens
tcttcacaggaaaaagtagaatatgccttcctgattatttttacagtcgagacatttttgaagattatagcgtatggattattgctacatcctaatgcttatgttaggaatggatggaatttactggattttgttatagtaatagtaggattgtttagtgtaattttggaacaattaaccaaagaaacagaaggcgggaaccactcaagcggcaaatctggaggctttgatgtcaaagccctccgtgcctttcgagtgttgcgaccacttcgactagtgtcaggagtgcccagtttacaagttgtcctgaactccattataaaagccatggttcccctccttcacatagcccttttggtattatttgtaatcataatctatgctattataggattggaactttttattggaaaaatgcacaaaacatgtttttttgctgactcagatatcgtagctgaagaggacccagctccatgtgcgttctcagggaatggacgccagtgtactgccaatggcacggaatgtaggagtggctgggttggcccgaacggaggcatcaccaactttgataactttgcctttgccatgcttactgtgtttcagtgcatcaccatggagggctggacagacgtgctctactgggtaaatgatgcgataggatgggaatggccatgggtgtattttgttagtctgatcatccttggctcatttttcgtccttaacctggttcttggtgtccttagtggagaattctcaaaggaaagagagaaggcaaaagcacggggagatttccagaagctccgggagaagcagcagctggaggaggatctaaagggctacttggattggatcacccaagctgaggacatcgatccggagaatgaggaagaaggaggagaggaaggcaaacgaaatactagcatgcccaccagcgagactgagtctgtgaacacagagaacgtcagcggtgaaggcgagaaccgaggctgctgtggaagtctctggtgctggtggagacggagaggcgcggccaaggcggggccctctgggtgtcggcggtggggtcaagccatctcaaaatccaaactcagccgacgctggcgtcgctggaaccgattcaatcgcagaagatgtagggccgccgtgaagtctgtcacgttttactggctggttatcgtcctggtgtttctgaacaccttaaccatttcctctgagcactacaatcagccagattggttgacacagattcaagatattgccaacaaagtcctcttggctctgttcacctgcgagatgctggtaaaaatgtacagcttgggcctccaagcatatttcgtctctcttttcaaccggtttgattgcttcgtggtgtgtggtggaatcactgagacgatcttggtggaactggaaatcatgtctcccctggggatctctgtgtttcggtgtgtgcgcctcttaagaatcttcaaagtgaccaggcactggacttccctgagcaacttagtggcatccttattaaactccatgaagtccatcgcttcgctgttgcttctgctttttctcttcattatcatcttttccttgcttgggatgcagctgtttggcggcaagtttaattttgatgaaacgcaaaccaagcggagcacctttgacaatttccctcaagcacttctcacagtgttccagatcctgacaggcgaagactggaatgctgtgatgtacgatggcatcatggcttacgggggcccatcctcttcaggaatgatcgtctgcatctacttcatcatcctcttcatttgtggtaactatattctactgaatgtcttcttggccatcgctgtagacaatttggctgatgctgaaagtctgaacactgctcagaaagaagaagcggaagaaaaggagaggaaaaagattgccagaaaagagagcctagaaaataaaaagaacaacaaaccagaagtcaaccagatagccaacagtgacaacaaggttacaattgatgactatagagaagaggatgaagacaaggacccctatccgccttgcgatgtgccagtaggggaagaggaagaggaagaggaggaggatgaacctgaggttcctgccggaccccgtcctcgaaggatctcggagttgaacatgaaggaaaaaattgcccccatccctgaagggagcgctttcttcattcttagcaagaccaacccgatccgcgtaggctgccacaagctcatcaaccaccacatcttcaccaacctcatccttgtcttcatcatgctgagcagcgctgccctggccgcagaggaccccatccgcagccactccttccggaacacgatactgggttactttgactatgccttcacagccatctttactgttgagatcctgttgaagatgacaacttttggagctttcctccacaaaggggccttctgcaggaactacttcaatttgctggatatgctggtggttggggtgtctctggtgtcatttgggattcaatccagtgccatctccgttgtgaagattctgagggtcttaagggtcctgcgtcccctcagggccatcaacagagcaaaaggacttaagcacgtggtccagtgcgtcttcgtggccatccggaccatcggcaacatcatgatcgtcaccaccctcctgcagttcatgtttgcctgtatcggggtccagttgttcaaggggaagttctatcgctgtacggatgaagccaaaagtaaccctgaagaatgcaggggacttttcatcctctacaaggatggggatgttgacagtcctgtggtccgtgaacggatctggcaaaacagtgatttcaacttcgacaacgtcctctctgctatgatggcgctcttcacagtctccacgtttgagggctggcctgcgttgctgtataaagccatcgactcgaatggagagaacatcggcccaatctacaaccaccgcgtggagatctccatcttcttcatcatctacatcatcattgtagctttcttcatgatgaacatctttgtgggctttgtcatcgttacatttcaggaacaaggagaaaaagagtataagaactgtgagctggacaaaaatcagcgtcagtgtgttgaatacgccttgaaagcacgtcccttgcggagatacatccccaaaaacccctaccagtacaagttctggtacgtggtgaactcttcgcctttcgaatacatgatgtttgtcctcatcatgctcaacacactctgcttggccatgcagcactacgagcagtccaagatgttcaatgatgccatggacattctgaacatggtcttcaccggggtgttcaccgtcgagatggttttgaaagtcatcgcatttaagcctaaggggtattttagtgacgcctggaacacgtttgactccctcatcgtaatcggcagcattatagacgtggccctcagcgaagcagacccaactgaaagtgaaaatgtccctgtcccaactgctacacctgggaactctgaagagagcaatagaatctccatcacctttttccgtcttttccgagtgatgcgattggtgaagcttctcagcaggggggaaggcatccggacattgctgtggacttttattaagtcctttcaggcgctcccgtatgtggccctcctcatagccatgctgttcttcatctatgcggtcattggcatgcagatgtttgggaaagttgccatgagagataacaaccagatcaataggaacaataacttccagacgtttccccaggcggtgctgctgctcttcaggtgtgcaacaggtgaggcctggcaggagatcatgctggcctgtctcccagggaagctctgtgaccctgagtcagattacaaccccggggaggagtatacatgtgggagcaactttgccattgtctatttcatcagtttttacatgctctgtgcatttctgatcatcaatctgtttgtggctgtcatcatggataatttcgactatctgacccgggactggtctattttggggcctcaccatttagatgaattcaaaagaatatggtcagaatatgaccctgaggcaaagggaaggataaaacaccttgatgtggtcactctgcttcgacgcatccagcctcccctggggtttgggaagttatgtccacacagggtagcgtgcaagagattagttgccatgaacatgcctctcaacagtgacgggacagtcatgtttaatgcaaccctgtttgctttggttcgaacggctcttaagatcaagaccgaagggaacctggagcaagctaatgaagaacttcgggctgtgataaagaaaatttggaagaaaaccagcatgaaattacttgaccaagttgtccctccagctggtgatgatgaggtaaccgtggggaagttctatgccactttcctgatacaggactactttaggaaattcaagaaacggaaagaacaaggactggtgggaaagtaccctgcgaagaacaccacaattgccctacaggcgggattaaggacactgcatgacattgggccagaaatccggcgtgctatatcgtgtgatttgcaagatgacgagcctgaggaaacaaaacgagaagaagaagatgatgtgttcaaaagaaatggtgccctgcttggaaaccatgtcaatcatgttaatagtgataggagagattcccttcagcagaccaataccacccaccgtcccctgcatgtccaaaggccttcaattccacctgcaagtgatactgagaaaccgctgtttcctccagcaggaaattcggtgtgtcataaccatcataaccataattccataggaaagcaagttcccacctcaacaaatgccaatctcaataatgccaatatgtccaaagctgcccatggaaagcggcccagcattgggaaccttgagcatgtgtctgaaaatgggcatcattcttcccacaagcatgaccgggagcctcagagaaggtccagtgtgaaaagaacccgctattatgaaacttacattaggtccgactcaggagatgaacagctcccaactatttgccgggaagacccagagatacatggctatttcagggacccccactgcttgggggagcaggagtatttcagtagtgaggaatgctacgaggatgacagctcgcccacctggagcaggcaaaactatggctactacagcagatacccaggcagaaacatcgactctgagaggccccgaggctaccatcatccccaaggattcttggaggacgatgactcgcccgtttgctatgattcacggagatctccaaggagacgcctactacctcccaccccagcatcccaccggagatcctccttcaactttgagtgcctgcgccggcagagcagccaggaagaggtcccgtcgtctcccatcttcccccatcgcacggccctgcctctgcatctaatgcagcaacagatcatggcagttgccggcctagattcaagtaaagcccagaagtactcaccgagtcactcgacccggtcgtgggccacccctccagcaacccctccctaccgggactggacaccgtgctacacccccctgatccaagtggagcagtcagaggccctggaccaggtgaacggcagcctgccgtccctgcaccgcagctcctggtacacagacgagcccgacatctcctaccggactttcacaccagccagcctgactgtccccagcagcttccggaacaaaaacagcgacaagcagaggagtgcggacagcttggtggaggcagtcctgatatccgaaggcttgggacgctatgcaagggacccaaaatttgtgtcagcaacaaaacacgaaatcgctgatgcctgtgacctcaccatcgacgagatggagagtgcagccagcaccctgcttaatgggaacgtgcgtccccgagccaacggggatgtgggccccctctcacaccggcaggactatgagctacaggactttggtcctggctacagcgacgaagagccagaccctgggagggatgaggaggacctggcggatgaaatgatatgcatcaccaccttgtagcccccagcgaggggcagactggctctggcctcaggtggggcgcaggagagccaggggaaaagtgcctcatagttaggaaagtttaggcactagttgggagtaatattcaattaattagacttttgtataagagatgtcatgcctcaagaaagccataaacctggtaggaacaggtcccaagcggttgagcctggcagagtaccatgcgctcggccccagctgcaggaaacagcaggccccgccctctcacagaggatgggtgaggaggccagacctgccctgccccattgtccagatgggcactgctgtggagtctgcttctcccatgtaccagggcaccaggcccacccaactgaaggcatggcggcggggtgcaggggaaagttaaaggtgatgacgatcatcacacctgtgtcgttacctcagccatcggtctagcatatcagtcactgggcccaacatatccatttttaaaccctttcccccaaatacactgcgtcctggttcctgtttagctgttctgaaata

SEQ ID NO: 95 - DNA, 1054 bp, Homo sapiens
cgcggagtctgagcggcgctcgtcccgtcccaaggccgacgccagcacgccgtcatggcccccgcagcggcgacggggggcagcaccctgcccagtggcttctcggtcttcaccaccttgcccgacttgctcttcatctttgagtttatcttcgggggcctggtgtggatcctggtggcctcctccctggtgccctggcccctggtccagggctgggtgatgttcgtgtctgtgttctgcttcgtggccaccaccaccttgatcatcctgtacataattggagcccacggtggagagacttcctgggtcaccttggacgcagcctaccactgcaccgctgccctcttttacctcagcgcctcagtcctggaggccctggccaccatcacgatgcaagacggcttcacctacaggcactaccatgaaaacattgctgccgtggtgttctcctacatagccactctgctctacgtggtccatgcggtgttctctttaatcagatggaagtcttcataaagccgcagtagaacttgagctgaaaacccagatggtgttaactggccgccccactttccggcataactttttagaaaacagaaatgcccttgatggtggaaaaaagaaaacaaccccaacccccccactgcccaaaaaaaaaagccctgccctgttgctcgtgggtgctgtgtttactctcccgtgtgccttcgcgtccgggttgggagcttgctgtgtctaacctccaactgctgtgctgtctgctagggtcacctcctgtttgtgaaaggggaccttcttgttcgggggtgggaagtggcgaccgtgacctgagaaggaaagaaagatcctctgctgacccctggagcagctctcgagaactacctgttggtattgtccacaagctctcccgagcgccccatcttgtgccatgttttaagtcttcatggatgttctgcatgtcatggggactaaaactcacccaacagatctttccagaggtccatggtggaagacgataaccctgtgaaatactttataaaatgtcttaatgttc

SEQ ID NO: 96 - DNA, 2655 bp, Homo sapiens
tttcccgaaaaccagttcctccattagaagaggccctcaaacaaattcaggaatccaacttaaaatcagaagtaaaccttcccttttcccgtagaccaacaataaactggagagctatagattctgccttgccttccgcattatcaaaaaatgatcacaagcatcagaaacaactcttatccaaaatcaattgtgagaaagaaatgaatgaaaacatgagggcaaccttggctactagcaaaaatgtgttccagcttaaactggaggaaactcagaaactcctcgaagatcaacatctaagcaatttgcaaaaattttgtgatgaagttaatcagataaccaattctgaaaccctctcaagtatagacagtcttgaggctacagagcatgaagaaatatatttaacacttaataaggagcattccacatccatccagcggaataccatttccctcaaaccagcaaatatgcaatcaactaatctcagctgctttgatgaagataaactggcattctctaaaactcaacatataaataattggcttacaaatttagatgcttcaaatactcagaatgtcacagctttctcagatattttaagtaaatctaatgttctgccttcatgggaatattttaatagtaaagaacaaaatccatctcctttgaatggaacagtggaaagagccacaaatactgctaataattcagtaccctttgtatctagcccacccatgtttgtactagataaaaaatgtgaaaagacctctgaaactagcactatgaggacaactgactccacttctggagcattcaaaagagagagaccattagttactgagagcccaacatttaaatttagcaaatcccaaagcacttcagattctctaacccaggaagtggctacatttccagaccaagagaaatattctgaattaaatcaagaaaatggaactacttcaattcctacttcatgtgtaccagtggcaacgcctttagttttgccatctaatatacagtcagctagaccttcagcaaagaacagtatacacataaaagaaattgatgcagtgcagtgttctgataagttagatgaattgaaagatggtaaagaagaagagataaaatattttaattgcaataaggaagagttgcctttattttcagacagttttcaagatgcctatatacctcacaatcctgattcaaaagatgaaaaacaaaaattagctgaaacatcatccttgtctaatgtaacttctaattatgactttgttggccagcataagaaaatgaaatacaacatccatgagagaaatggtgtgagatttcttaaaagtattttaaagaaagaatctaaatatgaacatggttatcttaaggcattaattataaatcagagctttaagtttggaaatcaaaaagcagcagctatcagagatagtattgaattaacaaaggaaaaaggtgcagaaattccaaagactattaaaaaactgaggtggtttgatgaaactagcaatatagaaaacaatgctgaaaacagtcattcactgaagaataaaacaggaacaactcaacagcattctcaacaattccacattcaaagtggtgctggaagcaacataattagtgtttctacttgtgctgtaaattctgctgatacaaagaagtccagggaggattctatctctgaaaatgttacgactttaggaggatctggagcagaccatatgcctttgaactgttttataccttcaggttataactttgctaaacatgcctggccagcctcaaaaaaagaagaaagtaaaatccctgtacatgatgattctaaaactaagcaaggtaagccacaaagaggtagagcaaaaataattagaaaaccaggatctgcaaaagtccaatcaggctttatatgtacaaacagaaaaggcgctgtcattcaaccacagtctgcaagcaaagtcaacatatttacacaagctcagggaaaattaattataccttgtcctcctcctcaatctacatcaaatattagaagtggtaaaaatatacaagtgtctcagtgtcaaccagtaactcctgaaaatcctcaaaacattattacacataactcttttaattcaaaacatgtgcttccaacagaacacagtttgaatcagtggaatcaggaaagtagttctccactctcaaatgcttgttctgacctagtcactgtgataccatcactgccatcatattgttcttcagagtgccaaactttcgcaaaaataaatcattcaaatggcactcaagcagttgcccggcaagatgcgacattatattgcacccaaagaagtcctgtttgtgaagaaagttatccgtctgtgactctaagaactgctgaagaagaatcagttcccttatggaaaagaggtcctaatgtcctgcatcaaaataagagggctacagatagtacttctgagtttttgatggctgaaaacttagtgaaagcatcagtgccggaggatgagattctgactgtcttgaatagcaaacagatacagaaatcaaatctacctttaaataaaactcaacaattcaacatctgcacactgtcagctgaagaacagaagatcctagagtcccttaatgatctcaatgaaagactacatt

SEQ ID NO: 97 - DNA, 1212 bp, Homo sapiens
atgcctccaatctcagacgctatgtccaccaaaggctccgtggttctggcctacagtggcagcctggacacctcctgcaccctcctgtggctgaaggaacaaggctatgacgtcattgcctacctggccaacattggccagaaggaagacttcgaggaagccaggaagaatgcactgaagtttggggctaaaaaggtgttcattgaggatgtcggcagggagtttgtggaggagttcatctggccggccatccagtccagtgcactgtatgaggaccgctaccttctgggcacctctcgccaggccctgcatcgcctgcaaacaaatggaaatcacccagtggaagggggccaagtatatgtcccacagcaccacgggaaatgggaacaatcagccccccagataaaggtcattgctccctggaggatgcccaaattctacaaccagctcaagggcctcaatgacctgatggaatatgcaaagcaacacaggattcccatcccggtcacacccaagaactcgtggagcatggacgagaacctcatgcatatcagctacgagtctggaatcctggagaaccctaagaaccaagcacctccagaccaggacccggccaaagcccccaacacccctgacattctcgagatcgagttcaaaaaaggagtccctgtgaaggtgaccaacgtcaaggatggcaccacccaccagacctcattggagctcttcatgtacctgaacgaagtcgtgggcaagcagggtgtgggctgtattgacatcatggagaaccgcttcattggaatgaagtcccgagggatctaccaggccccagcaagcaccatcctttacctcgctcatttagacaccaaggccttcaccatgggccaggaagtgcgcaaaatcaaacaaggcctgggcttgaaatttgttgagctggtggataccggtttctggtacagccctgagtgtgaatttgtctgccactgcatcgccaagtcccaggagcaagtggaagggaaagtgcaggtgtccgtcctcgagggccaggtgtacatccttggccaggagtccccactgtctctctacaaggaggagccggtgagcatgaacgtgcagggtgattatcagccaattgatgccaccgggttcatcaacatcaattccctcaggctgaaggaatatcatcgtctccagagcaaggtcactgccaaatag

SEQ ID NO: 98 - DNA, 1002 bp, Homo sapiens
tgccagagaggctccctcagccctgctccgcggggtccacagcgggctccacagcgggctccatagcgggctccacagcggtccggcggcggcagcgagcccgtgggcagtgggggttggtcccgtggctccggcccccggtgcagaatggcggcggcggttcggatgaacatccagatgctgctggaggcggccgactatctggagcggcgggagagagaagctgaacatggttatgcctccatgttaccatacaataacaaggacagagatgccttaaaacggaggaacaaatccaaaaagaataacagcagtagcagaggaacaagcaatcataatggagaaaatagacgggctcatcttcgcttgtgcctggagaagttgaaggggctggtgccactgggacccgaatcaagtcgacacactacgttgagtttattaacaaaagccaaattgcacataaagaaacttgaagattgtgacagaaaagccgttcaccaaatcgaccagcttcagcgagagcagcgacacctgaagaggcagctggagaagctgggcattgagaggatccggatggacagcatcggctccaccgtctcctcggagcgctccgactccgacagggaagaaatcgacgttgacgtggagagcacggactatctcacaggtgatctggactggagcagcagcagtgtgagcgactctgacgagcggggcagcatgcagagcctcggcagtgatgagggctattccagcaccagcatcaagagaataaagctgcaggacagtcacaaggcatgtcttggtctctaagagagtgggcactgcggctgtctccttgaaggttctccctgttggttctgattaggtaacgtattggacctgcccacaactcccttgcacgtaaacttcagtgtcccaccttgaccaaaatcagctttgtaactgttttcaaggaggtgcttaggattgtgggtttctgattgcatccactagcttctc

SEQ ID NO: 99 - DNA, 1262 bp, Homo sapiens
cctgcggtggaagcacacctcctccctgaaggtggccaacgagcccgtcttagccttcacgcagggcagccctgagcgagatgccctgcaaaaggccttgaaggacctgaagggccggatggaagccatcccatgcgtggtgggggatgaggaggtgtggacgtcggacgtgcagtaccaagtgtcgccttttaaccatggacataaggtggccaagttctgttatgcagacaagagcctgctcaacaaagccattgaggctgccctggctgcccggaaagagtgggacctgaagcctattgcagaccgggcccagatcttcctgaaggcggcagacatgctgacaccttcaaacacctgtggaagcaggtggcccagaacctggaccggttccacaccttcccacgcctggctggagagtgcggcggaaagaacttcccacttcgtgcaccgctcggccgacgtggagagcgtggtgagcgggaccctccgctcagccttcgagtacggtggccagaagtgttccgcctgctcgcgtctctacgtgccgcactcgctgtggccgcagatcaaagggcggctgctggaggagcacagtcggatcaaagtgggcgaccctgcagaggattttgggaccttcttctctgcagtgattgatgccaagtcctttgcccgtatcaagaagtggctggagcacgcacgctcctcacccagcctcaccatcctggccgggggcaagtgtgatgactccgtgggctactttgtggagccctgcatcgtggagagcaaggaccctcaggagcccatcatgaaggaggagatcttcgggcctgtactgtctgtgtacgtctacccggatgacaagtacaaggagacgctgcagctggttgacagcaccaccagctatggcctcacgggggcagtgttctcccaggataaggacgtcgtgcaggaggccacaaaggtgctgaggaatgctgccggcaacttctacatcaacgacaagtccactggctcgatagtgggccagcagccctttgggggggcccgagcctctgagaaaaacagaagtgtcttttccgcaggaaccaatgacaagccagggggcccacactacatcctgcgctggacgtcgccgcaggtcatcaaggagacacataagcccctgggggactggagctacgcgtacatgcagctctggtttgagatcgtgctggggaggaacatggccactaccccttatcccatcggccatgtgggag

SEQ ID NO: 100 - DNA, 3783 bp, Homo sapiens
caacaggcacctggctgcagccaggaaggaccgcacgccctttcgcgcaggagagtggaaggagggagctgtttgccagcaccgaggtcttgcggcacaggcaacgcttgacctgagtcttgcagaatgaaaggcatcacaggaggcctctgcatgatgtggcttccaaagactcaaggaccacccacattacaagtctggattgaggaaggcagaaatggagattcaaacaccacgtcttctattattttattaatcaatctgtagacatgtgtccccactgcagggagtgaactgctccaagggagaaacttctgggagcctccaaactcctagctgtctcatcccttgccctggagagacggcagaaccatggcattttatagctgctgctgggtcctcttggcactcacctggcacacctctgcctacgggccagaccagcgagcccaaaagaagggggacattatccttggggggctctttcctattcattttggagtagcagctaaagatcaagatctcaaatcaaggccggagtctgtggaatgtatcaggtataatttccgtgggtttcgctggttacaggctatgatatttgccatagaggagataaacagcagcccagcccttcttcccaacttgacgctgggatacaggatatttgacacttgcaacaccgtttctaaggccttggaagccaccctgagttttgttgctcaaaacaaaattgattctttgaaccttgatgagttctgcaactgctcagagcacattccctctacgattgctgtggtgggagcaactggctcaggcgtctccacggcagtggcaaatctgctggggctcttctacattccccaggtcagttatgcctcctccagcagactcctcagcaacaagaatcaattcaagtctttcctccgaaccatccccaatgatgagcaccaggccactgccatggcagacatcatcgagtatttccgctggaactgggtgggcacaattgcagctgatgacgactatgggcggccggggattgagaaattccgagaggaagctgaggaaagggatatctgcatcgacttcagtgaactcatctcccagtactctgatgaggaagagatccagcatgtggtagaggtgattcaaaattccacggccaaagtcatcgtggttttctccagtggcccagatcttgagcccctcatcaaggagattgtccggcgcaatatcacgggcaagatctggctggccagcgaggcctgggccagctcctccctgatcgccatgcctcagtacttccacgtggttggcggcaccattggattcgctctgaaggctgggcagatcccaggcttccgggaattcctgaagaaggtccatcccaggaagtctgtccacaatggttttgccaaggagttttgggaagaaacatttaactgccacctccaagaaggtgcaaaaggacctttacctgtggacacctttctgagaggtcacgaagaaagtggcgacaggtttagcaacagctcgacagccttccgacccctctgtacaggggatgagaacatcagcagtgtcgagaccccttacatagattacacgcatttacggatatcctacaatgtgtacttagcagtctactccattgcccacgccttgcaagatatatatacctgcttacctgggagagggctcttcaccaatggctcctgtgcagacatcaagaaagttgaggcgtggcaggtcctgaagcacctacggcatctaaactttacaaacaatatgggggagcaggtgacctttgatgagtgtggtgacctggtggggaactattccatcatcaactggcacctctccccagaggatggctccatcgtgtttaaggaagtcgggtattacaacgtctatgccaagaagggagaaagactcttcatcaacgaggagaaaatcctgtggagtgggttctccagggaggtgcccttctccaactgcagccgagactgcctggcagggaccaggaaagggatcattgagggggagcccacctgctgctttgagtgtgtggagtgtcctgatggggagtatagtgatgagacagatgccagtgcctgtaacaagtgcccagatgacttctggtccaatgagaaccacacctcctgcattgccaaggagatcgagtttctgtcgtggacggagccctttgggatcgcactcaccctctttgccgtgctgggcattttcctgacagcctttgtgctgggtgtgtttatcaagttccgcaacacacccattgtcaaggccaccaaccgagagctctcctacctcctcctcttctccctgctctgctgcttctccagctccctgttcttcatcggggagccccaggactggacgtgccgcctgcgccagccggcctttggcatcagcttcgtgctctgcatctcatgcatcctggtgaaaaccaaccgtgtcctcctggtgtttgaggccaagatccccaccagcttccaccgcaagtggtgggggctcaacctgcagttcctgctggttttcctctgcaccttcatgcagattgtcatctgtgtgatctggctctacaccgcgcccccctcaagctaccgcaaccaggagctggaggatgagatcatcttcatcacgtgccacgagggctccctcatggccctgggcttcctgatcggctacacctgcctgctggctgccatctgcttcttctttgccttcaagtcccggaagctgccggagaacttcaatgaagccaagttcatcaccttcagcatgctcatcttcttcatcgtctggatctccttcattccagcctatgccagcacctatggcaagtttgtctctgccgtagaggtgattgccatcctggcagccagctttggcttgctggcgtgcatcttcttcaacaagatctacatcattctcttcaagccatcccgcaacaccatcgaggaggtgcgttgcagcaccgcagctcacgctttcaaggtggctgcccgggccacgctgcgccgcagcaacgtctcccgcaagcggtccagcagccttggaggctccacgggatccaccccctcctcctccatcagcagcaagagcaacagcgaagacccattcccacagcccgagaggcagaagcagcagcagccgctggccctaacccagcaagagcagcagcagcagcccctgaccctcccacagcagcaacgatctcagcagcagcccagatgcaagcagaaggtcatctttggcagcggcacggtcaccttctcactgagctttgatgagcctcagaagaacgccatggcccacgggaattctacgcaccagaactccctggaggcccagaaaagcagcgatacgctgacccgacaccagccattactcccgctgcagtgcggggaaacggacttagatctgaccgtccaggaaacaggtctgcaaggacctgtgggtggagaccagcggccagaggtggaggaccctgaagagttgtccccagcacttgtagtgtccagttcacagagctttgtcatcagtggtggaggcagcactgttacagaaaacgtagtgaattcataaaatggaaggagaagactgggctagggagaatgcagagaggtttcttggggtcccagggatgaggaatcgccccagactcctttcctctgaggaagaagggataatagacacatcaaatgccccgaatttagtcacaccatcttaaatgacagtgaattgacccatgttcccttt

SEQ ID NO: 101 - DNA, 1923 bp, Homo sapiens
atgctgcgcctggggaggctgtgcgccgggagctcgggggtgctgggggcccgggcccgccctctctcggagttggcaggaagccaggttgcaggttccagagaggtggatcgcatggtctccacgcccatcggaggcctcagctacgttcaggggtgcaccaaaaagcatcttaacagcaagactgtgggccagtgcctggagaccacagcacagagggtcccagaacgagaggccttggtcgtcctccatgaagacgtcaggttgacctttgcccaactcaaggaggaggtggacaaagctgcttctggcctcctgagcattggcctctgcaaaggtgaccggctgggcatgtggggacctaactcctatgcatgggtgctcatgcagttggccaccgcccaggcgggcatcattctggtgtctgtgaacccagcctaccaggctatggaactggagtatgtcctcaagaaggtgggctgcaaggcccttgtgttccccaagcaattcaagacccagcaatactacaacgtcctgaagcagatctgtccagaagtggagaatgcccagccaggggccttgaagagtcagaggctcccagatctgaccacagtcatctcggtggatgcccctttgccggggaccctgctcctggatgaagtggtggcggctggcagcacacggcagcatctggaccagctccaatacaaccagcagttcctgtcctgccatgaccccatcaacatccagttcacctcggggacaacaggcagccccaagggggccaccctctcccactacaacattgtcaacaactccaacattttaggagagcgcctgaaactgcatgagaagacaccagagcagttgcggatgatcctgcccaaccccctgtaccattgcctgggttccgtggcaggcacaatgatgtgtctgatgtacggtgccaccctcatcctggcctctcccatcttcaatggcaagaaggcactggaggccatcagcagagagagccaggagactgaggatggggacagtggaggacccccaggagaggaccagttcctgcctcaggagcttctcctgcctattccctttgctgcagtttcatggcggggtggaggcaccttcctgtatggtacccccacgatgttcgtggacattctgaaccagccagacttctccagttatgacatctcgaccatgtgtggaggtgtcattgctgggtcccctgcacctccagagttgatccgagccatcatcaacaagataaatatgaaggacctggtggttgcttatggaaccacagagaacagtcccgtgacattcgcgcacttccctgaggacactgtggagcagaaggcagaaagcgtgggcagaattatgcctcacacggaggcccggatcatgaacatggaggcagggacgctggcaaagctgaacacgcccggggagctgtgcatccgagggtactgcgtcatgctgggctactggggtgagcctcagaagacagaggaagcagtggatcaggacaagtggtattggacaggagatgtcgccacaatgaatgagcagggcttctgcaagatcgtgggccgctctaaggatatgatcatccggggtggtgagaacatctaccccgcagagctcgaggacttctttcacacacacccgaaggtgcaggaagtgcaggtggtgggagtgaaggacgatcggatgggggaagagatttgtgcctgcattcggctgaaggacggggaggagaccacggtggaggagataaaagctttctgcaaagggaagatctctcacttcaagattccgaagtacatcgtgtttgtcacaaactaccccctcaccatttcaggaaagatccagaaattcaaacttcgagagcagatggaacgacatctaaatctgtga

SEQ ID NO: 102 - DNA, 3344 bp, Homo sapiens
ggtacagctgcgcgtctgcgggaataggtgcagcgggcccttggcgggggactctgagggaggagctggggacggcgaccctaggagagttctttggggtgactttcaagatggactctactctaacagcaagtgaaatccggcagcgatttatagatttcttcaagaggaacgagcatacgtatgttcactcgtctgccaccatcccattggatgaccccactttgctctttgccaatgcaggcatgaaccagtttaaacccattttcctgaacacaattgacccatctcaccccatggcaaagctgagcagagctgccaatacccagaagtgcatccgggctgggggcaaacataatgacctggacgatgtgggcaaggatgtctatcatcacaccttcttcgagatgctgggctcttggtcttttggagattactttaaggaattggcatgtaagatggctctggaactcctcacccaagagtttggcattcccattgaaagactttatgttacttactttggcggggatgaagcagctggcttagaagcagatctggaatgcaaacagatctggcaaaatttggggctggatgacaccaaaatcctcccaggcaacatgaaggataacttctgggagatgggtgacacgggcccctgtggtccttgcagtgagatccactacgaccggattggtggtcgggacgccgcacatcttgtcaaccaggacgaccctaatgtgctggagatctggaaccttgtgttcatccagtataacagggaagctgatggcattctgaaacctcttcccaagaaaagcattgacacagggatgggcctggaacgactggtatctgtgctgcagaataagatgtccaactatgacactgacctttttgtcccttactttgaagccattcagaagggcacaggtgcccgaccatacactgggaaagttggtgctgaggatgccgatgggattgacatggcctaccgggtgctggctgaccacgctcggaccatcactgtggcactggctgatggtggccggcctgacaacacagggcgtggatatgtgttgagacggattctccgccgagctgtccgatacgcccatgaaaagctcaatgccagcaggggcttctttgctacgttagtggatgttgtcgtccagtccctgggagatgcatttcctgagctgaagaaggacccagacatggtgaaggacatcattaatgaagaagaggtgcagtttctcaagactctcagcagagggcgtcgcatcctggacaggaaaattcagagcctgggagacagcaagaccattcccggagacactgcttggctcctctatgacacctatgggtttccagtggatctgactggactgattgctgaagagaagggcctggtggtagacatggatggctttgaagaggagaggaaactggcccagctgaaatcacagggcaagggagctggtggggaagacctcattatgctggacatttacgctatcgaagagctccgggcacggggtctggaggtcacagatgattccccaaagtacaattaccatttggactccagtggtagctatgtatttgagaacacagtggctacggtgatggctctgcgcagggagaagatgttcgtggaagaggtgtccacaggccaggagtgtggagtggtgctggacaagacctgtttctatgctgagcaaggaggccagatctatgacgaaggctacctggtgaaggtggatgacagcagtgaagataaaacagagtttacagtgaagaatgctcaggtccgaggagggtatgtgctacacattggaaccatctacggtgacctgaaagtgggggatcaggtctggctgtttattgatgagccccgacgaagacccatcatgagcaaccacacagctacgcacattctgaacttcgccctgcgctcagtgcttggggaagctgaccagaaaggctcattggttgctcctgaccgcctcagatttgactttactgccaagggagccatgtccacccaacagatcaagaaggctgaagagattgctaatgagatgattgaggcagccaaggccgtctatacccaggattgccccctggcagcagcgaaagccatccagggcctacgggctgtgtttgatgagacctatcctgaccctgtgcgagtcgtctccattggggtcccggtgtccgagttgctggatgacccctctgggcctgctggctccctgacttctgttgagttctgtgggggaacgcacctgcggaactcgagtcatgcaggagcttttgtgatcgtgacggaagaagccattgccaagggtatccggaggattgtggctgtcacaggtgccgaggcccagaaggccctcaggaaagcagagagcttgaagaaatgtctctctgtcatggaagccaaagtgaaggctcagactgctccaaacaaggatgtgcagagggagatcgctgaccttggagaggccctggccactgcagtcatcccccagtggcagaaggatgaattgcgggagactctcaaatccctaaagaaggtcatggatgacttggaccgagccagcaaagccgatgtccagaaacgagtgttagagaagacgaagcagttcatcgacagcaaccccaaccagcctcttgtcatcctggagatggagagcggcgcctcagccaaggccctgaatgaagccttgaagctcttcaagatgcactcccctcagacttctgccatgctcttcacggtggacaatgaggctggcaagatcacgtgcctgtgtcaagtcccccagaatgcagccaatcggggcttaaaagccagcgagtgggtgcagcaggtgtcaggcttgatggacggtaaaggtggtggcaaggatgtgtctgcacaggccacaggcaagaacgttggctgcctgcaggaggcgctgcagctggccacttccttcgcccagctgcgcctcggggatgtaaagaactgagtggggaaggaggaggctcccactggatccatccgtccagccaagagctcttcatctgctacaagaacatttgaatcttgggacctttaaagagcccctcctaacccagcagtaactggaacacacttgggagcagtcctatgtctcagtgccccttaaatttctgccctgagccctccacgtcagtgccatcggtctagaaccactaaccccgcattgctgttgatcgtcacgctcgcatctatagataacggctctccagacctgagctttccgcgtcagcaagtaggaatcgtttttgctgcagagaataaaaggaccacgtgc

SEQ ID NO: 103 - DNA, 450 bp, Homo sapiens
agagaagtaatggaaggcctgtctgatgttgcttcttttgcaactaaacttaaaaacactctcatccagtaccatagcattgaagaagataagtggcgagttgctaagaaaacgaattgctgtgtgatgcgttacactactgctggtcagctttggaatataatttccccaagagaatttgttgatttctcctatactgtgggctataaagaagggcttttatcttgtggaataagtcttgactgggatgaaaagagaccagaatttgttcgaggatataaccatccctgtggttggttttgtgttccacttaaagacaacccaaaccagagtcttttgacaggatatattcagacagatctgcgtgggatgattcctcagtctgcggtagatacagccatggcaagcactttaaccaacttctatggtgatttacgaaaagctttatga

SEQ ID NO: 104 - DNA, 1067 bp, Homo sapiens
ctcccagaagggtgttgctcatcgtttcttcccggaaacatctgcagagactagcttttcaggctaaggtatcctccatgatgttaccattgcaaggtgcccagatgctgcagatgctggagaaatccttgaggaagagcctcccagcatccttaaaggtttatggaactgtctttcacataaaccatggaaatccattcaatctgaaggctgtggtggacaagtggcctgattttaatacagtggttgtctgccctcaggagcaggatatgacagatgaccttgatcactataccaatacttaccaaatctactccaaagatccccaaaactgtcaggaattccttggatcaccagaactcatcaactggaaacagcatttacagattcaaagttcacagcctagcctgaatgaggctatacaaaatcttgcagccattaagtccttcaaagtcaaacaaacacaacgcattctctatatggcagctgaaacagccaaggaactgactcctttcctgctgaaatcaaagattttatctcccagtggtggcaaacccaaggccatgtgagtttgataaaatccagtctgtaccactcacacttctcaagtaacctcccaacttctctccctgcattcactctggctttcctacaatcaatgttgtacaaagaaatcagaattacatttttaaaaaatgtaactcagaacatgtttctctcctgcttaaaagactccaccatctcccttctcatctagaataaaccaggcctctggctaccacttggacctttattgcccttcctgctttcttcctccaacagctctgaccttcactctgttcctctttcatcacaagctcatctatattccaggacttcacatttgttatttcttctgtctactctgtctctcaagacaatagaggtcacagcaaatacaaacctttatactaatggattttgttttcttcttggaccctccatagcaaccaagagatgtttaaactctcatccatggatgttacccatgctcacttggtgaataaattctggcattttggtggtaa

SEQ ID NO: 105 - DNA, 848 bp, Homo sapiens
gatgcgaccgactttgagtggagcttctggatggaatgggggaagcagtggctggtgtggcttctccttggccacatggtagtgtctcaaatggccacactgctggcaagaaagcacagaccctggattctcatgctctatgggatgtgggcctgctggtgtgtgctggggacccctggtgtggctatggttttgctccataccaccatctctttctgcgtggcccagttccggtctcagctcctgacgtggctctgttctctcctcctcctctccacactgaggctgcagggtgtggaagaagttaagagaaggtggtacaagacagaaaacgagtactacctgctgcagttcacgctgaccgttcgctgcctctactacaccagcttcagcctggagctctgctggcagcagctgcctgctgcatcgacctcctactcctttccctggatgctggcctatgtcttttattatccagtcttacacaatgggcccatcctcagcttctcggagttcatcaaacagatgcagcagcaggagcatgactccctgaaggccagcctgtgtgtcctggccctggggctgggccgccttctttgctggtggtggctggccgagctgatggctcacctgatgtacatgcatgccatctacagcagcatccccctcctggagactgtctcttgttggaccttaggaggactggcgttagcccaggtgctctttttctacgtgaagtacttggtgctctttggcgtgcctgctctgctcatgcgcctggatggactcactccacccgccctcccccgctgcgtgagcaccatgttcagtttcaccgggatgtggag

SEQ ID NO: 106 - DNA, 5957 bp, Homo sapiens
agaagatagatgaagagaatgaggcaaacttgctagcagtcctcacagagacactagacagtctccctgtggatgaagacggattgccctcatttgatgcgctgacagatggagacgtgaccactgacaatgaggctagtccttcctccatgcctgacggcacccctccaccccaggaggcagaagagccgtctctacttaagaagctcttactggcaccagccaacactcagctaagttataatgaatgcagtggtctcagtacccagaaccatgcaaatcacaatcacaggatcagaacaaaccctgcaattgttaagactgagaattcatggagcaataaagcgaagagtatttgtcaacagcaaaagccacaaagacgtccctgctcggagcttctcaaatatctgaccacaaacgatgaccctcctcacaccaaacccacagagaacagaaacagcagcagagacaaatgcacctccaaaaagaagtcccacacacagtcgcagtcacaacacttacaagccaaaccaacaactttatctcttcctctgaccccagagtcaccaaatgaccccaagggttccccatttgagaacaagactattgaacgcaccttaagtgtggaactctctggaactgcaggcctaactccacccaccactcctcctcataaagccaaccaagataacccttttagggcttctccaaagctgaagtcctcttgcaagactgtggtgccaccaccatcaaagaagcccaggtacagtgagtcttctggtacacaaggcaataactccaccaagaaagggccggagcaatccgagttgtatgcacaactcagcaagtcctcagtcctcactggtggacacgaggaaaggaagaccaagcggcccagtctgcggctgtttggtgaccatgactattgccagtcaattaattccaaaacggaaatactcattaatatatcacaggagctccaagactctagacaactagaaaataaagatgtctcctctgattggcaggggcagatttgttcttccacagattcagaccagtgctacctgagagagactttggaggcaagcaagcaggtctctccttgcagcacaagaaaacagctccaagaccaggaaatccgagccgagctgaacaagcacttcggtcatcccagtcaagctgtttttgacgacgaagcagacaagaccggtgaactgagggacagtgatttcagtaatgaacaattctccaaactacctatgtttataaattcaggactagccatggatggcctgtttgatgacagcgaagatgaaagtgataaactgagctacccttgggatggcacacaatcctattcattgttcaatgtgtctccttcttgttcttcttttaactctccatgtagagattctgtgtcaccacccaaatccttattttctcaaagaccccaaaggatgcgctctcgttcaaggtccttttctcgacacaggtcgtgttcccgatcaccatattccaggtcaagatcaaggtctccaggcagtagatcctcttcaagatcctgctattactatgagtcaagccactacagacaccgcacgcaccgaaattctcccttgtatgtgagatcacgttcaagatcgccctacagccgtcggcccaggtatgacagctacgaggaatatcagcacgagaggctgaagagggaagaatatcgcagagagtatgagaagcgagagtctgagagggccaagcaaagggagaggcagaggcagaaggcaattgaagagcgccgtgtgatttatgtcggtaaaatcagacctgacacaacacggacagaactgagggaccgttttgaagtttttggtgaaattgaggagtgcacagtaaatctgcgggatgatggagacagctatggtttcattacctaccgttatacctgtgatgcttttgctgctcttgaaaatggatacactttgcgcaggtcaaacgaaactgactttgagctgtacttttgtggacgcaagcaatttttcaagtctaactatgcagacctagattcaaactcagatgactttgaccctgcttccaccaagagcaagtatgactctctggattttgatagtttactgaaagaagctcagagaagcttgcgcaggtaacatgttccctagctgaggatgacagagggatggcgaatacctcatgggacagcgcgtccttccctaaagactattgcaagtcatacttaggaatttctcctactttacactctctgtacaaaaacaaaacaaaacaacaacaatacaacaagaacaacaacaacaataacaacaatggtttacatgaacacagctgctgaagaggcaagagacagaatgatatccagtaagcacatgtttattcatgggtgtcagctttgcttttcctggagtctcttggtgatggagtgtgcgtgtgtgcatgtatgtgtgtgtgtatgtatgtgtgtggtgtgtgtgcttggtttaagggaagtatgtgtgggtacatgtgaggactgggggcacctgaccagaatgcgcaagggcaaaccatttcaaatggcagcagttccatgaagacacgcttaaaacctagaacttcaaaatgttcgtattctattcaaaaggaaaaatatatatatatatatatatatatataaattaaaaaggaaagaaaactaacaaccaaccaaccaaccaaccaaccacaaaccaccctaaaatgacagccgctgatgtctgggcatcagcctttgtactctgtttttttaagaaagtgcagaatcaacttgaagcaagctttctctcataacgtaatgattatatgacaatcctgaagaaaccacaggttccatagaactaatatcctgtctctctctctctctctctctctctctcttttttttttctttttccttttgccatggaatctgggtgggagaggatactgcgggcaccagaatgctaaagtttcctaacattttgaagtttctgtagttcatccttaatcctgacacccatgtaaatgtccaaaatgttgatcttccactgcaaatttcaaaagccttgtcaatggtcaagcgtgcagcttgttcagcggttctttctgaggagcggacaccgggttacattactaatgagagttgggtagaactctctgagatgtgttcagatagtgtaattgctacattctctgatgtagttaagtatttacagatgttaaatggagtatttttattttatgtatatactatacaacaatgttcttttttgttacagctatgcactgtaaatgcagccttcttttcaaaactgctaaatttttcttaatcaagaatattcaaatgtaattatgaggtgaaacaattattgtacactaacatatttagaagctgaacttactgcttatatatatttgattgtaaaaacaaaaagacagtgtgtgtgtctgttgagtgcaacaagagcaaaatgatgctttccgcacatccatcccttaggtgagcttcaatctaagcatcttgtcaagaaatatcctagtcccctaaaggtattaaccacttctgcgatatttttccacattttcttgtcgcttgtttttctttgaagttttatacactggatttgttaggggaatgaaattttctcatctaaaatttttctagaagatatcatgattttatgtaaagtctctcaatgggtaaccattaagaaatgtttttattttctctatcaacagtagttttgaaactagaagtcaaaaatctttttaaaatgctgttttgttttaatttttgtgattttaatttgatacaaaatgctgaggtaataattatagtatgatttttacaataattaatgtgtgtctgaagactatctttgaagccagtatttctttcccttggcagagtatgacgatggtatttatctgtattttttacagttatgcatcctgtataaatactgatatttcattcctttgtttactaaagagacatatttatcagttgcagatagcctatttattataaattatgagatgatgaaaataataaagccagtggaaattttctacctaggatgcatgacaattgtcaggttggagtgtaagtgcttcatttgggaaattcagcttttgcagaagcagtgtttctacttgcactagcatggcctctgacgtgaccatggtgttgttcttgatgacattgcttctgctaaatttaataaaaacttcagaaaaacctccattttgatcatcaggatttcatctgagtgtggagtccctggaatggaattcagtaacatttggagtgtgtattcaagtttctaaattgagattcgattactgtttggctgacatgacttttctggaagacatgatacacctactactcaattgttcttttcctttctctcgcccaacacgatcttgtaagatggatttcacccccaggccaatgcagctaattttgatagctgcattcatttatcaccagcatattgtgttctgagtgaatccactgtttgtcctgtcggatgcttgcttgattttttggcttcttatttctaagtagatagaaagcaataaaaatactatgaaatgaaagaacttgttcacaggttctgcgttacaacagtaacacatctttaatccgcctaattcttgttgttctgtaggttaaatgcaggtattttaactgtgtgaacgccaaactaaagtttacagtctttctttctgaattttgagtatcttctgttgtagaataataataaaaagactattaagagcaataaattatttttaagaaatcgagatttagtaaatcctattatgtgttcaaggaccacatgtgttctctattttgcctttaaatttttgtgaaccaattttaaatacattctcctttttgccctggattgttgacatgagtggaatacttggtttcttttcttacttatcaaaagacagcactacagatatcatattgaggattaatttatcccccctacccccagcctgacaaatattgttaccatgaagatagttttcctcaatggacttcaaattgcatctagaattagtggagcttttgtatcttctgcagacactgtgggtagcccatcaaaatgtaagctgtgctcctctcatttttatttttatttttttgggagagaatatttcaaatgaacacgtgcaccccatcatcactggaggcaaatttcagcatagatctgtaggatttttagaagaccgtgggccattgccttcatgccgtggtaagtaccacatctacaattttggtaaccgaactggtgctttagtgatgtggatttttttcttttttaaaagagatgtagcagaataattcttccagtgcaacaaaatcaattttttgctaaacgactccgagaacaacagttgggctgtcaacattcaaagcagcagagagggaactttgcactattggggtatgatgtttgggtcagttgataaaaggaaaccttttcatgcctttagatgtgagcttccagtaggtaatgattatgtgtcctttcttgatggctgtaatgagaacttcaatcactgtagtctaagacctgatctatagatgacctagaatagccatgtactataatgtgatgattctaaatttgtacctatgtgacagacattttcaataatgtgaactgctgatttgatggagctactttaagatttgtaggtgaaagtgtaatactgttggttgaactatgctgaagagggaaagtgagcgattagttgagcccttgccgggccttttttccacctgccaattctacatgtattgttgtggttttattcattgtatgaaaattcctgtgattttttttaaatgtgcagtacacatcagcctcactgagctaataaagggaaacgaatgtttcaaatct

SEQ ID NO: 107 - DNA, 927 bp, Homo sapiens
atggcggctcagaaagatctctgggacgccattgtgattggggcggggatccagggctgcttcactgcataccacctggccaaacacaggaagaggatcctcctgctggagcagaagggttttcagagccagcaggctacagggcaagttctttctaccacactcccgaggaagctcccatggacaaagccggataatccgaaaggcgtacctggaaagactttttacacccggatgatgcatgagtgctatcagatatgggcccagctggagcacgaggctggaacccaaattgcacaggatgcaattcgacagctaggaggcatagtgcgtgacggagagaaggtggtggagataaacccagggctactggtcacggtgaaaaccacctccaggagctaccaagctaagagcttggtcatcacagcaggtccttggaccaaccagctcctccgtcccctgggcattgagatgcctctccagaccctgcggatcaacgtgtgttactggcgagagatggttcctgggagctatggtgtgtcccaggcctttccgtgcttcctgtggctgggcttgtgtccccaccacatctacggactgcccacaggagagtacccagggctgatgaaggtcagctatcaccacggcaaccacgcagaccctgaggagcgggactgccccacagcacgcacagacatcggagacgtccagatcctgagcagctttgtcagagatcacttacctgatctgaagcccgagcctgctgtcattgagagctgcatgtacacgggaagggggcacgggttcaagctggcccctgtggtggggaagatcctgtatgaattaagcatgaaattaacaccatcttatgacttggcaccttttcgaatcagccgtttcccaagcctgggcaaagcccacctttga

SEQ ID NO: 108 - DNA, 579 bp, Homo sapiens
atggccgaagacgcagacatgcgcaatgagctggaggagatgcagcgaagggctgaccagttggctgatgagagtaaagatgctggtatcaggactttggttatgttggatgaacaaggagaacaactcgatcgtgtcgaagaaggcatgaaccatatcaaccaagacatgaaggaggctgagaaaaatttaaaagatttagggaaatgctgtggccttttcatatgtccttgtaacaagcttaaatcaagtgatgcttacaaaaaagcctggggcaataatcaggacggagtggtggccagccagcctgctcgtgtagtggacgaacgggagcagatggccatcagtggcggcttcatccgcagggtaacaaatgatgcccgagaaaatgaaatggatgaaaacctagagcaggtgagcggcatcatcgggaacctccgtcacatggccctggatatgggcaatgagatcgatacacagaatcgccagatcgacaggatcatggagaaggctgattccaacaaaaccagaattgatgaggccaaccaacgtgcaacaaagatgctgggaagtggttaa

SEQ ID NO: 109 - DNA, 2696 bp, Homo sapiens
ggatcctaggatgcttacatgcaatgatgaacccgaaaacacttgcaaagtgctacgcaaatattgatcacgaagaaggaagtcctcttcccgcctggagactgtgtggggtatggcggggtggtggggagaatgtggtgtcttgctccaccctcctggcgaggggagggcctggcctggaccgcagaggaatcgagtgactgcccctaaaatctcctagaaccgatcccgcggccccgcccctcccgcggccccgcccctcccgcggcccgtcagcctctgccgcggagctgcgtccgccactcatgtttctccgagccggcctggccgcgctctccccgcttcttcgcagtcttcggccctctcctgtcgccgccatgagcactggcaccttcgtcgtgtcgcagccgctcaattaccgcggcggggcccgcgtggagccggcggacgcctccggtaccgagaaagctttcgagccagcaaccggccgagtgatagctactttcacatgttcaggagaaaaggaagtaaatttggctgttcaaaatgcaaaggctgcttttaaaatatggagtcaaaaatctggcatggagcgttgccgaatccttttggaggctgccaggataataagggaacgggaggatgaaattgctactatggagtgcatcaacaatggcaagtccatctttgaggcccgcttggacatcgacatttcctggcagtgcctggagtattatgcgggcttggctgcatccatggctggtgaacacatccagctcccaggtggatcgtttggttataccagaagagaaccacttggggtatgtgtgggaataggagcatggaactacccctttcagattgcctcttggaagtcggctccagcattagcctgtggtaatgccatggtctttaaaccttctccctttacacctgtttctgcattgctactggctgaaatctacagtgaggctggtgtacctcctgggctcttcaatgtggtgcagggaggggctgccacaggccagtttctgtgtcagcatcccgatgtggccaaagtctccttcactggaagtgtgcccactggcatgaagatcatggagatgtcagctaaaggaatcaaacctgttaccttggaacttggaggcaaatctccactcatcatcttctcagactgtgatatgaacaatgctgtaaagggggcgctgatggccaacttcctcacacaaggccaggtttgctgtaatggcacaagagtatttgtgcagaaagaaattcttgataaatttacagaggaagtggtgaaacagacccaaaggattaaaattggagatccccttctggaagatacaaggatgggtccactcatcaaccgaccacacctggagcgagtccttgggtttgtcaaagtggcaaaggagcagggtgctaaagtgttatgtggtggagatatatatgtacctgaagatcccaaattaaaggatggatattacatgagaccttgtgtattaactaattgcagagacgacatgacctgtgtgaaggaagagatctttgggcctgttatgtccattttatcatttgacactgaagctgaggttctagaaagagccaatgataccacttttggactagcagctggcgtctttaccagggacatccaacgggctcatagagtggtagctgagcttcaggctgggacgtgcttcattaacaactataacgtcagcccagtggagttgccctttggtggatataagaagtcaggatttggcagagagaacggccgtgtgacaatcgaatattattcacagctgaagactgtgtgtgtggagatgggtgatgtggaatctgctttttgaaaacctgcagtgaaacctattgacatggccacgctgtggaatgatgtgaattggccctgtttacagaggcagtacaactgaatgttattttacatccagaattttggcgttcagtataagagaatggttcatgttactctttctctctccatcagcttcctcactgaaaatgtgcattaagtgccttgtagatactaatcaagaaagctgtgattctcctcaaagcgtatttttgtgaaatcttttaagagccagtaacatacttctagagaacaggaaaagagactaggataatacatcttccacacatttggcccactgataatgttaattctctggcgtatttcaaagaacttgttcctggctgatccaagtgcagtggtatttacaactaattgatcacaaccagtttgtagatttctttgttccttctccattcccactgcttcacttgcctagtcttgaagaaaaaaaacaaaaaacaaaaaaaaaccttgttcctttataggttcctggtagaatcagtagagatgatttcagctcattgacatttttttaagctatatccccttgtcattccattgagaaagctgacaactgggatagggaggggattcgataatagatggggtcaaattctgtgtgaatgtgaacttgcctagtaagcactttgtctctgttcactactgcgatagaggaaatctatctccctatcttgggtccttgaactacagcctgctgtcttacaccagtggagctaccctttaaatgtacaaattatttgtatgctaatgtaatatggtgaaattaaaataaatcacactgttaattgtt

SEQ ID NO: 110 - DNA, 200 bp, Homo sapiens
gagttccagctgctggagaggactgtgtagaagttaccatgagcaatatcagtagcatcgtgaaccgggcccgtgatgcctttaactcaggcaagactcgaccgctgcagttccgggttgagcagctggaggcgttgcagcgcatgatcaacgagaacttgaaaggcatctccaaggcgctggcctctaacctgcgcaag

SEQ ID NO: 111 - DNA, 1716 bp, Homo sapiens
cccgcgcgctgctgcagctgctgcgctcagacctgcgtctgggccgcccgctgctggcggcgctggcgctgctggccgcgctcgactggctgtgccagcgcctgctgcccccgccggccgcactcgccgtgctggccgccgccggctggatcgcgttgtcccgcctggcgcgcccgcagcgcctgccggtggccactcgctcggtgctcatcaccggctgtgactctggttttggcaaggagacggccaagaaactggactccatgggcttcacggtgctggccaccgtattggagttgaacagccccggtgccatcgagctgcgtacctgctgctcccctcgcctaaggctgctgcagatggacctgaccaaaccaggagacattagccgcgtgctagagttcaccaaggcccacaccaccagcaccggcctgtggggcctcgtcaacaacgcaggccacaatgaagtagttgctgatgcggagctgtctccagtggccactttccgtagctgcatggaggtgaatttctttggcgcgctcgagctgaccaagggcctcctgcccctgctgcgcagctcaaggggccgcatcgtgactgtggggagcccagcgggggacatgccatatccgtgcttgggggcctatggaacctccaaagcggccgtggcgctactcatggacacattcagctgtgaactccttccctggggggtcaaggtcagcatcatccagcctggctgcttcaagacagagtcagtgagaaacgtgggtcagtgggaaaagcgcaagcaattgctgctggccaacctgcctcaagagctgctgcaggcctacggcaaggactacatcgagcacttgcatgggcagttcctgcactcgctacgcctggccatgtccgacctcaccccagttgtagatgccatcacagatgcgctgctggcagctcggccccgccgccgctattaccccggccagggcctggggctcatgtacttcatccactactacctgcctgaaggcctgcggcgccgcttcctgcaggccttcttcatcagtcactgtctgcctcgagcactgcagcctggccagcctggcactaccccaccacaggacgcagcccaggacccaaacctgagccccggcccttccccagcagtggctcggtgagccatgtgcacctatggcccagccactgcagcacaggaggctccgtgagcccttggttcctccccgaaaacccccagcattacgatcccccaagtgtcctggaccctggcctaaagaatcccacccccacttcatgcccactgccgatgcccaatccaggcccggtgaggccaaggtttcccagtgagcctctgcgcctctccactgtttcatgagcccaaacaccctcctggcacaacgctctaccctgcagcttggagaactccgctggatggggagtctcatgcaagacttcactgcagcctttcacaggactctgcagatagtgcctctgcaaactaaggagtgactaggtgggttggggaccccctcaggattgtttctcggcaccagtgcctcagtgctgcaattgagggctaaatcccaagtgtctcttgactggctcaagaattagggccccaactacacacccccaagccacagggaagcatgtactgtacttcccaattgccacattttaaataaagacaaatttttatttcttcta

SEQ ID NO: 112 - DNA, 5003 bp, Homo sapiens
cgcgcagcatgcccgccagcgccccgccgcgccgcccgcggccgccgccgccgtcgctgtcgctgctgctggtgctgctgggcctgggcggccgccgcctgcgtgcggagccgggcgacggcgcgcagacctgggcccgtttctcgcggcctcctgcccccgaggccgcgggcctcttccagggcaccttccccgacggcttcctctgggccgtgggcagcgccgcctaccagaccgagggcggctggcagcagcacggcaagggtgcgtccatctgggacacgttcacccaccaccccctggcacccccgggagactcccggaacgccagtctgccgttgggcgccccgtcgccgctgcagcccgccaccggggacgtagccagcgacagctacaacaacgtcttccgcgacacggaggcgctgcgcgagctcggggtcactcactaccgcttctccatctcgtgggcgcgagtgctccccaatggcagcgcgggcgtccccaaccgcgaggggctgcgctactaccggcgcctgctggagcggctgcgggagctgggcgtgcagcccgtggtcaccctgtaccactgggacctgccccagcgcctgcaggacgcctacggcggctgggccaaccgcgccctggccgaccacttcagggattacgcggagctctgcttccgccacttcggcggtcaggtcaagtactggatcaccatcgacaacccctacgtggtggcctggcacggctacgccaccgggcgcctggcccccggcatccggggcagcccgcggctcgggtacctggtggcgcacaacctcctcctggctcatgccaaagtctggcatctctacaatacttctttccgtcccactcagggaggtcaggtgtccattgccctaagctctcactggatcaatcctcgaagaatgaccgaccacagcatcaaagaatgtcaaaaatctctggactttgtactaggttggtttgccaaacccgtatttattgatggtgactatcccgagagcatgaagaataacctttcatctattctgcctgattttactgaatctgagaaaaagttcatcaaaggaactgctgacttttttgctctttgctttggacccaccttgagttttcaacttttggaccctcacatgaagttccgccaattggaatctcccaacctgaggcaactgctttcctggattgaccttgaatttaaccatcctcaaatatttattgtggaaaatggctggtttgtctcagggaccaccaagagagatgatgccaaatatatgtattacctcaaaaagttcatcatggaaaccttaaaagccatcaagctggatggggtggatgtcatcgggtataccgcatggtccctcatggatggtttcgagtggcacagaggttacagcatcaggcgtggactcttctatgttgactttctaagccaggacaagatgttgttgccaaagtcttcagccttgttctaccaaaagctgatagagaaaaatggcttccctcctttacctgaaaatcagcccctagaagggacatttccctgtgactttgcttggggagttgttgacaactacattcaagtagataccactctgtctcagtttaccgacctgaatgtttacctgtgggatgtccaccacagtaaaaggcttattaaagtggatggggttgtgaccaagaagaggaaatcctactgtgttgactttgctgccatccagccccagatcgctttactccaggaaatgcacgttacacattttcgcttctccctggactgggccctgattctccctctgggtaaccagtcccaggtgaaccacaccatcctgcagtactatcgctgcatggccagcgagcttgtccgtgtcaacatcaccccagtggtggccctgtggcagcctatggccccgaaccaaggactgccgcgcctcctggccaggcagggcgcctgggagaacccctacactgccctggcctttgcagagtatgcccgactgtgctttcaagagctcggccatcacgtcaagctttggataacgatgaatgagccgtatacaaggaatatgacatacagtgctggccacaaccttctgaaggcccatgccctggcttggcatgtgtacaatgaaaagtttaggcatgctcagaatgggaaaatatccatagccttgcaggctgattggatagaacctgcctgccctttctcccaaaaggacaaagaggtggccgagagagttttggaatttgacattggctggctggctgagcccattttcggctctggagattatccatgggtgatgagggactggctgaaccaaagaaacaattttcttcttccttatttcactgaagatgaaaaaaagctaatccagggtacctttgactttttggctttaagccattataccaccatccttgtagactcagaaaaagaagatccaataaaatacaatgattacctagaagtgcaagaaatgaccgacatcacgtggctcaactcccccagtcaggtggcggtagtgccctgggggttgcgcaaagtgctgaactggctgaagttcaagtacggagacctccccatgtacataatatccaacggaatcgatgacgggctgcatgctgaggacgaccagctgagggtgtattatatgcagaattacataaacgaagctctcaaagcccacatactggatggtatcaatctttgcggatactttgcttattcgtttaacgaccgcacagctccgaggtttggcctctatcgttatgctgcagatcagtttgagcccaaggcatccatgaaacattacaggaaaattattgacagcaatggtttcccgggcccagaaactctggaaagattttgtccagaagaattcaccgtgtgtactgagtgcagtttttttcacacccgaaagtctttactggctttcatagcttttctattttttgcttctattatttctctctcccttatattttactactcgaagaaaggcagaagaagttacaaatagttctgaacatttttctattcattcattttgaaataattatgcagacacatcagctgttaaccatttgcacctctaagtgttgtgaaactgtaaatttcatacatttgacttctagaaaacatttttgtggcttatgacagaggttttgaaatgggcataggtgatcgtaaaatattgaataatgcgaatagtgcctgaatttgttctctttttgggtgattaaaaaactgacaggcactataatttctgtaacacactaacaaaagcatgaaaaataggaaccacaccaatgcaacatttgtgcagaaatttgaatgacaagattaggaatattttcttctgcacccacttctaaatttaatgtttttctggaagtagtaattgcaagagttcgaatagaaagttatgtaccaagtaaccatttctcagctgccataataatgcctagtggcttcccctctgtcaaatctagtttcctatggaaaagaagatggcagatacaggagagacgacagagggtcctaggctggaatgttcctttcgaaagcaatgcttctatcaaatactagtattaatttatgtatctggttaatgacatacttggagagcaaattatggaaatgtgtattttatatgatttttgaggtcctgtctaaaccctgtgtccctgagggatctgtctcactggcatcttgttgagggccttgcacataggaaacttttgataagtatctgcggaaaaacaaacatgaatcctgtgatattgggctcttcaggaagcataaagcaattgtgaaatacagtataccgcagtggctctaggtggaggaaaggaggaaaaagtgcttattatgtgcaacattatgattaatctgattatacaccatttttgagcagatcttggaatgaatgacatgacctttccctagagaataaggatgaaataatcactcattctatgaacagtgacactactttctattctttagctgtactgtaatttctttgagttgatagttttacaaattcttaataggttcaaaagcaatctggtctgaataacactggatttgtttctgtgatctctgaggtctattttatgtttttgctgctacttctgtggaagtagctttgaactagttttactttgaactttcacgctgaaacatgctagtgatatctagaaagggctaattaggtctcatcctttaatgccccttaaataagtcttgctgattttcagacagggaagtctctctattacactggagctgttttatagataagtcaatattgtatcaggcaagataaaccaatgtcataacaggcattgccaacctcactgacacagggtcatagtgtataataatatactgtactatataatatatcatctttagaggtatgattttttcatgaaagataagcttttggtaatattcattttaaagtggacttattaaaattggatgctagagaatcaagtttattttatgtatatatttttctgattataagagtaatatatgttcattgtaaaaatttttaaaacacagaaactatatgcaaagaaaaaataaaaattatctataatctcagaacccagaaatagccactattaacatttcctacgtattttattttacatagatcatattgtatatagttagtatctttattaatttttattatgaaactttcctttgtcattattagtcttcaaaagcatgatttttaatagttgttgagtattccaccacaggaatgtatcacaacttaaccgttcccgtttgttagactagtttcttattaatgttgatgaatgttgtttaaaaataattttgttgctacatttactttaatttccttgactgtaaagagaagtaattttgctccttgataaagtattatattaataataaatctgcctgcaactttttgccttctttcataatc

SEQ ID NO: 113 - DNA, 397 bp, Homo sapiens
ccgctgagtgtttgcctcttgatcaggaactcctgcttctccctgcctctaaatggaccccaactgctcctgctcgcctgatggttcctgcgcctgtgccggctcctgcaaatgaaaagagtgcacatgcacctcctgcaagaagagctgctgctcctgctgccctgtgggctgtgccaagtgtgcccagggctgcatctgcaaagggacgtcggacaactgcagctgctgtgcctgatgccaggacagccctgctctcagatgtaaatagagcaaccttataaacctggatttttttggtacaaccctgacccatttgctacatctttttttctatgaaatatgtgaatggcaataaattcatctagactaaaaaaaaaaaaaaaaaaaaaaaaaa

SEQ ID NO: 114 - DNA, 1415 bp, Homo sapiens
gggcgctgagaggcgagcgtgagcccagcgacaggagagtgagctcaccacgcgcagcgccatgaccagcaagggtcccgaggaggagcacccatcggtgacgctcttccgccagtacctgcgtatccgcactgtccagcccaagcctgactatggagctgctgtggctttctttgaggagacagcccgccagctgggcctgggctgtcagaaagtagaggtggcacctggctatgtggtgaccgtgttgacctggccaggcaccaaccctacactctcctccatcttgctcaactcccacacggatgtggtgcctgtcttcaaggaacattggagtcacgacccctttgaggccttcaaggattctgagggctacatctatgccaggggtgcccaggacatgaagtgcgtcagcatccagtacctggaagctgtgaggaggctgaaggtggagggccaccggttccccagaaccatccacatgacctttgtgcctgatgaggaggttgggggtcaccaaggcatggagctgttcgtgcagcggcctgagttccacgccctgagggcaggctttgccctggatgagggcatagccaatcccactgatgccttcactgtcttttatagtgagcggagtccctggtgggtgcgggttaccagcactgggaggccaggccatgcctcacgcttcatggaggacacagcagcagagaagctgcacaaggttgtaaactccatcctggcattccgggagaaggaatggcagaggctgcagtcaaacccccacctgaaagaggggtccgtgacctccgtgaacctgactaagctagagggtggcgtggcctataacgtgatacctgccaccatgagcgccagctttgacttccgtgtggcaccggatgtggacttcaaggcttttgaggagcagctgcagagctggtgccaggcagctggcgagggggtcaccctagagtttgctcagaagtggatgcacccccaagtgacacctactgatgactcaaacccttggtgggcagcttttagccgggtctgcaaggatatgaacctcactctggagcctgagatcatgcctgctgccactgacaaccgctatatccgcgcggtgggggtcccagctctaggcttctcacccatgaaccgcacacctgtgctgctgcacgaccacgatgaacggctgcatgaggctgtgttcctccgtggggtggacatatatacacgcctgctgcctgcccttgccagtgtgcctgccctgcccagtgacagctgagccctggaactcctaaacctttgcccctggggcttccatcccaaccagtgccaaggacctcctcttcccccttccaaataataaagtctatggacagggctgtctctgaagtactaacacaaggaca

SEQ ID NO: 115 - DNA, 1553 bp, Homo sapiens
atgctgcaggagtggctggcggctgtgggcgatgactatgctgctgtggtctggaggcctgagggcgagcccaggttctacccagatgaagagggtcccaagcactggaccaaagaaaggcaccagtttctgatggagctgaagcaggaagccctcacctttgccaggaactggggggccgactatatcctgtttgcagacacagacaacattctgaccaacaatcagactctgcggcttctcatggggcaggggcttccagtggtggccccaatgctggactcccagacctactactccaacttctggtgtgggatcaccccccagggctactaccgccgcacagccgagtacttccccaccaagaaccgccagcgccggggctgcttccgtgtccccatggtccactccaccttccttgcatccctgcgggctgaaggggcagaccagcttgctttctacccgccacatcccaactacacttggcctttcgacgacatcatcgtcttcgcctatgcctgccaggctgctggggtctccgtccacgtgtgcaatgagcaccgttatgggtacatgaatgtgccggtgaaatcccaccaggggctggaagacgagagggtcaacttcatccacctgatcttagaagcactagtggacggcccccgcatgcaggcctcagctcatgtgactcggccctctaagaggcccagcaagatagggtttgacgaggtctttgtcatcagcctggctcgcaggcctgaccgtcgggaacgcatgctcgcctcgctctgggagatggagatctctgggagggtggtggacgctgtggatggctgatgctcaacagcagtgccatcaggaacctcggcgtagacctgctcccgggctaccaggacccttactcgggccgcactctgaccaagggcgaggtgggctgcttcctcagccattactccatctgggaagaggtggttgccaggggcctggcccgggtcctggtgtttgaggatgacgtgcgctttgagagcaacttcagggggcggctggagcggctgatggaggatgtggaggcagagaaactgtcttgggacctgatctacctcggacggaagcaggtgaaccctgagaaggagacggccgtggaggggctgccgggcctggtggtggctgggtactcctactggacgctggcctatgccctgcgtctggcgggtgcccgcaagctgctggcctcacagcctctgcgccgcatgctgcccgtggacgagttcctgcccatcatgttcgaccagcaccccaacgagcagtacaaggcacacttctggccacgggacctggtggccttctccgcccagcccctgctcgctgcccctacccactatgccggggacgccgagtggctcagtgacacggagacatcctctccatgggatgatgacagcggccgcctcatcagctggagcggctcccaaaagaccctgcgcagcccccgcctggacctgactggcagcagcgggcacagcctccaaccccagccccgagatgagctctag

SEQ ID NO: 116 - DNA, 2659 bp, Homo sapiens
acacgacgacttcgctcggaggcacatcggccctggggacaaagaccagagagagatgctgcagaccttggggctggcgagcattgatgaattgatcgagaagacggtccctgccaacatccgtttgaaaagacccttgaaaatggaagaccctgtttcagtcagtttggacaagaccttttgtttcccttgcaggatcacccagtatactccataccagcctgaggtgtctcaggggaggctggagagtttactcaactaccagaccatggtgtgtgacatcacaggcctggacatggccaatgcatccctgctggatgaggggactgcagccgcagaggcactgcagctgtgctacagatatactggagtcctcactgagctgaagttaccctgtgaaatggacttcagtggaaaagatgtcagtggagtgttgttccagtacccagacacggaggggaaggtggaagactttacggaactcgtggagagagctcatcagagtgggagcctggcctgctgtgctactgaccttttagctttgtgcatcttgaggccacctggagaatttggggtagacatcgccctgggcagctcccagagatttggagtgccactgggctatgggggaccccatgcagcattttttgctgtccgagaaagcttggtgagaatgatgcctggaagaatggtgggggtaacaagagatgccactgggaaagaagtgtatcgtcttgctcttcaaaccagggagcaacacattcggagagacaaggctaccagcaacatctgtacagctcaggccctcttggcgaatatggctgccatgtttgcaatctaccatggttcccatgggctggagcatattgctaggagggtacataatgccactttgattttgtcagaaggtctcaagcgagcagggcatcaactccagcatgacctgttctttgataccttgaagattcagtgtggctgctcagtgaaggaggtcttgggcagggccgctcagcggcagatcaattttcggctttttgaggatggcacacttggtatttctcttgatgaaacagtcaatgaaaaagatctggacgatttgttgtggatctttggttgtgagtcatctgcagaactggttgctgaaagcatgggagaggagtgcagaggtattccagggtctgtgttcaagaggaccagcccgttcctcacccatcaagtgttcaacagctaccactctgaaacaaacattgtccggtacatgaagaaactggaaaataaagacatttcccttgttcacagcatgattccactgcctatcacatggaaagaatttgcaaacatccacccctttgtgcctctggatcaagctcaaggatatcagcagcttttccgagagcttgagaaggatttgtgtgaactcacaggttatgaccaggtctgtttccagccaaacagcggagcccagggagaatatgctggactggccactatccgagcctacttaaaccagaaaggagaggggcacagaacggtttgcctcattccgaaatcagcacatgggaccaacccagcaagtgcccacatggcaggcatgaagattcagcctgtggaggtggataaatatgggaatatcgatgcagttcacctcaaggccatggtggataagcacaaggagaacctagcagctatcatgattacatacccatccaccaatggggtgtttgaagagaacatcagtgacgtgtgtgacctcatccatcaacatggaggacaggtctacctagacggggcaaatatgaatgctcaggtgggaatctgtcgccctggagacttcgggtctgatgtctcgcacctaaatcttcacaagaccttctgcattccccacggaggaggtggtcctggcatggggcccatcggagtgaagaaacatctcgccccgtttttgcccaatcatcccgtcatttcactaaagcggaatgaggatgcctgtcctgtgggaaccgtcagtgcggccccatggggctccagttccatcttgcccatttcctgggcttatatcaagatgatgggaggcaagggtcttaaacaagccacggaaactgcgatattaaatgccaactacatggccaagcgattagaaacacactacagaattcttttcaggggttatgtgggtcatgaatttattttggacacgagacccttcaaaaagtctgcaaatattgaggctgtggatgtggccaagagactccaggattatggatttcacgcccctaccatgtcctggcctgtggcagggaccctcatggtggagcccactgagtcggaggacaaggcagagctggacagattctgtgatgccatgatcagcattcggcaggaaattgctgacattgaggagggccgcatcgaccccagggtcaatccgctgaagatgtctccacactccctgacctgcgttacatcttcccactgggaccggccttattccagagaggtggcagcattcccactccccttcgtgaaaccagagaacaaattctggccaacgattgcccggattgatgacatatatggagatcagcacctggtttgtacctgcccacccatggaagtttatgagtctccattttctgaacaaaagagggcgtcttcttag

SEQ ID NO: 117 - DNA, 1792 bp, Homo sapiens
ctgtccgcaccgctcgtgccgggactgcctccgccactacctgcgcctggagataagcgagagcagggtgcccatcagctgccccgagtgcagcgagcgactcaacccgcacgacatccgcttgctgctcgccgacccgccgcttatgcacaagtacgaggagttcatgctgcgccgctacctagcctcggaccccgactgccgctggtgcccggccccggactgcggttatgctgttattgcctatggctgtgccagctgcccgaagctaacttgtgagagggaaggttgccagactgagttctgctaccactgcaagcagatatggcatccaaatcagacatgcgatatggcccgtcaacagagggcccagactttacgagttcggaccaaacacacttcaggtctcagttatgggcaagaatctggaccagcagatgacatcaagccatgcccacgatgcagtgcatacattatcaagatgaatgatggaagctgtaatcacatgacctgtgcagtgtgtggctgtgaattctgttggctttgtatgaaagagatctcagacttgcattacctcagcccctctggctgtacattctggggcaagaagccatggagccgtaagaagaaaattctttggcagctgggcacgttgattggtgctccagtggggatttctctcattgctggcattgccattcctgccatggtcattggcattcctgtttatgttggaaggaagattcacagcaggtatgagggaaggaaaacctccaaacacaagaggaatttggctatcactggaggagtgactttgtcggtcattgcatccccagttattgctgcagttagtgttggtattggtgtccccattatgctggcatatgtttatggggttgtgcccatttctctttgtcgtggaggcggctgtggagttagcacagccaacggaaaaggagtgaaaattgaatttgatgaagatgatggtccaatcacagtggcagatgcctggagagccctcaagaatcccagcattggggaaagcagcattgaaggcctgactagtgtattgagcactagtggaagccctacagatggacttagtgttatgcaaggtccttacagcgaaacggccagctttgcagccctctcagggggcacgctgagtggcggcattctctccagtggcaagggaaaatatagcaggttagaagttcaagccgatgtccaaaaggaaattttccccaaagacacagccagtcttggtgcaattagtgacaacgcaagcactcgtgctatggccggttccataatcagttcctacaacccacaggacagagaatgcaacaatatggaaatccaagtggacattgaagccaaaccaagccactatcagctggtgagtggaagcagcacggaggactcgctccatgttcatgctcagatggcagagaatgaagaagaaggtagtggtggcggaggcagtgaagaggatcccccctgcagacaccaaagctgtgaacagaaagactgcctggccagcaaaccttgggacatcagcctggcccagcctgaaagcatccgcagtgacctagagagttctgatgcacagtcagacgatgtgccagacatcacctcagatgagtgtggctccccccgctcccatactgcagcctgcccctcgacccccagagcccaaggtgcaccgagcccaagtgcccatatgaacctctctgccctagccgagggacaaactgtcttgaagccagaaggtggagaagccagagtatga

SEQ ID NO: 118 - DNA, 2659 bp, Homo sapiens; identical to SEQ ID NO: 116

SEQ ID NO: 119 - DNA, 891 bp, Homo sapiens
atggtctccggcagcagcggcctcgccgccgcccgtctcctgtcgcgcagcttcctcctgccgcagaatggaattcggcattgttcctacacagcttctcggcaacatctctatgttgataaaaatacaaagattatttgccagggtttcactggcaaacagggcacctttcacagccagcaggcattggaatatggcaccaaactcgttggaggaaccactccagggaaaggaggccagacacatctgggcttacctgtctttaatactgtgaaggaggccaaagaacagacaggagcaacggcttctgtcatttatgttcctccgccttttgctgctgctgccattaatgaagctattgaggcagaaattcccttggttgtgtgtatcactgaaggaattccccagcaggacatggtacgagtcaagcacaaactgctgcgccaggaaaagacaaggctaattgggcccaactgccctggagtcatcaatcctggagaatgtaaaattggcatcatgcctggccatattcacaaaaaaggaaggattggcattggaggtgatccttttaatggaacagattttattgactgcctcgaaatctttttgaacgattctgccacagaaggcatcatattgattggtgaaattggtggtaatgcagaagagaatgctgcagaatttttgaagcaacataattcaggtccaaattccaagcctgtagtgtccttcattgctggtttaactgctcctcctgggagaagaatgggtcatgccggggcaattattgctggaggaaaaggtggagctaaagagaagatctctgcccttcagagtgcaggagttgtggtcagtatgtctcctgcacagctgggaaccacgatctacaag

SEQ ID NO: 120 - DNA, 828 bp, Homo sapiens
atgccgtcgaagggaaaggacaaaaagaaaggcaagagcaaaggcaaagacacgaagaagttaataaaaacagatgaatctgtggtggacagagccaaggccaatgcctccctttgggaggccaggttggaagtcacagaactctctaggattaagtatcgtgatacttcacggatactggcaaaaagtaatgaggacttaaagaaaaagcaatgtaaaatggagaaagacataatgtcagtattaagttacctgaagaagcaggatcaggagaaagataatatgattgaaaaactgaaacagcaattaaatgaaacaaaggaaaaagcccaagaggagaaggataaattggaacaaaagtataccaggcaaattaatgaactagagggacagttccatcaaaaagccaaagaaattggcatgattcacacagagctgaaagcagtaagacaattccagaagagaaaaatccaagtggagagagagttagatgatcaccgactagaacaagaggctgaaaagaagataataatgctagcagagagagcccaccatgaggctattgtgacacatattgaaggaaatgtggatattggagatttgacctgggagcagaaggaaaaagtattgcgattgctctttgcaaaaatgaatggctgtccttctagggatgaaagtaagcttcaagataaaatcttcatcacccagcaaattgcaatatcagactcttctggtgaagtggtgctacccactattccaaaagaacctcaggagtctgacacagtgggaagtcagagtcattacaacctagaggacaaaggcttataa

SEQ ID NO: 121 - DNA, 2321 bp, Homo sapiens
ggcttggaccgacgcggcccagaggccaggaacattccgcgcgtggaccagccgggccagggcgatgctgcgggtgcggtgtctgcgcggcgggagccgcggcgccgaggcggtgcactacatcggatctcggcttggacgaaccttgacaggatgggtgcagcgaactttccagagcacccaggcagctacggcttcctcccggaactcctgtgcagctgacgacaaagccactgagcctctgcccaaggactgccctgtctcttcttacaacgaatgggaccccttagaggaagtgatagtgggcagagcagaaaacgcctgtgttccaccgttcaccatcgaggtgaaggccaacacatatgaaaagtactggccattttaccagaagcatggagggcattattttcccaaagatcatttgaaaaaggctgttgctgaaattgaagaaatgtgcaatattttaaaaacggaaggagtgacagtaaggaggcctgaccccattgactggtcattgaagtataaaactcctgattttgagtctacgggtttatacagtgcaatgcctcgagacatcctgatagttgtgggcaatgagattatcgaggctcccatggcatggcgttcacgcttctttgagtaccgagcgtacaggtcaattatcaaagactacttccaccgtggcgccaagtggacaacagctcctaagcccacaatggctgatgagctttataaccaggattatcccatccactctgtagaagacagacacaaattggctgctcagggaaaatttgtgacaactgagtttgagccatgctttgatgctgctgacttcattcgagctggaagagatatttttgcacagagaagccaggttacaaactacctaggcattgaatggatgcgtaggcatcttgctccagactacagagtgcatatcatctcctttaaagatcccaatcccatgcatattgatgctaccttcaacatcattggacctggtattgtgctttccaaccctgaccgaccatgtcaccagattgatcttttcaagaaagcaggatggactatcattactcctccaacaccaatcatcccagacgatcatccactctggatgtcatccaaatggctttccatgaatgtcttaatgctagatgaaaaacgtgttatggtggatgccaatgaagttccaattcaaaagatgtttgaaaagctgggtatcactaccattaaagttaacattcgtaatgccaattccctgggaggaggcttccattgctggacctgcgatgtccggcgccgaggcaccttacagtcctacttggactgaacaggcctgatggagcttgtggctggcctcagatacacctaagaagcttaggggcaaggttcattctcctgctttaaaaagtgcatgaactgtagtgctttaaacaatcatctccttaacaggggtcgtaagcctggtttgcttctattacttttctttgacataaagaaaataacttctgctaggtattactctctactcctaaagttatttactatttggcttcaagtataaaattttggtgaatgtgtaccaagaaaaaattagtcacctgagtaacttggccactaataattaaccatctacctctgtttttaattttctttccaaaaggcagcttgaaatgttggtcctaatcttaattttttttcctcttctatagacttgagaatgtttttctctaaatgagagaaagacttagaatgtacacagatccaaaatagaatcagattatctctttttttctaaaggagagaaagacttagaacatacacagatcctaagtagaaccaggtaattgtctctttttctaataaggaatttgggtaatttttaattttttgttttttaaaaaataacctagactatgcaaaacatcaaagtgaattttccatgaatgtttttaatattctcatctcaacattgtgatatatgctactaaaaaccttttcatatacatcttacctcatttcaagtgaattattttaatctttttctctctttccaaaaatttaggaatgtttagtgtaattggatttcgctatcagttcccatccttaagttttgatattcaatatctgatagatacactgcatctttggtcatctaagatttgtttacaaatgtgcaaattatttagagcatagactttataagcattaaaaaaaactaatggaggtaaaacctaaatgcgatgtgaaataattttagtgttgataccgtatgtgtatttttattctaataaacttttgtgttccagattgaa

SEQ ID NO: 122 - DNA, 1316 bp, Homo sapiens
aaaaggattatagcagtctttgtgacaagcaaccgataggaagacgtctcttcaggcagttctgtgataccaaacccactctaaagaggcacattgaattcttggatgcagtggcagaatatgaagttgccgatgatgaggaccgaagtgattgtggactgtcaatcttagatagattcttcaatgataagttggcagcccctttaccagaaatacctccagatgttgtgacagaatgtagattgggactgaaggaggagaacccttccaaaaaagcctttgaggaatgtactaggcaacccgtaacaaagaacacatttagacattacagagttctaggaaaaggcggatttggagaggtttgcgcctgtcaagtgcgagccacaggaaaaatgtatgcctgcaaaaagctacaaaaaaaaagaataaagaagaggaaaggtgaagctatggctctaaatgagaaaagaattctggagaaagtgcaaagtagattcgtatgtcattacttcccccgtgacctgtgtaataacatatttgaacacacaggacacatccggatttcagacctcggtttggccacagagatcccagaaggacagagggttcgaggaagagttggaacagtcggctacatggcacctgaagttgtcaataatgaaaagtatacgtttagtcccgattggtggggacttggctgtctgatctatgaaatgattcagggacattctccattcaaaaaatacaaagagaaagtcaaatgggaggaggtcgatcaaagaatcaagaatgataccgaggagtattctgagaagttttcagaggatgccaaatctatctgcaggatgttactcaccaagaatccaagcaagcggctgggctgcaggggcgagggagcggctggggtgaagcagcaccccgtgttcaaggacatcaacttcaggaggctggaggcaaacatgctggagccccctttctgtcctgatcctcatgccgtttactgtaaggacgtcctggatatcgagcagttctcggcggtgaaagggatctacctggacaccgcagatgaagacttctatgctcggtttgctaccgggtgtgtctccatcccctggcagaatgagatgatcgaatctgggtgtttcaaagacatcaacaaaagtgaaagtgaggaagctttgccattagatctagacaagaacatacataccccggtttccagaccaaacagaggcttcttctatagactcttcagaagagggggctgcctgaccatggtccccagtgagaaggaagtggaacccaagcaatgctga

SEQ ID NO: 123 - DNA, 1305 bp, Homo sapiens
gctgcagccctcagaagtaagcaaggtttcctgccgggagaaaaggatttgaagcattccagccaaaatgacggacagaagccccttcgaaaccgacatgctcaccctgacccgctacgttatggaaaaggggcgtcaggccaaagggactggggagctcacccagctgctgaactcaatgctgacggccatcaaagccatctcctcggctgtgcgcaaggccggtctggcccacctgtatggaatcgcaggaagcgttaacgtgacgggagatgaggtgaagaaactggatgtgctatccaattccctggtgatcaacatgctccaatcctcctatagtacctgcgtcctggtctcagaagagaataaggacgccatcatcaccgccaaggagaagcgggggaaatacgtggtctgctttgacccactggatggatcttccaatattgactgcctggcctccatcggaaccatctttgccatctatagaaagacctcagaggatgagccttctgaaaaggatgccctgcagtgtggccgcaatattgtggccgcaggttatgcgctgtacggtagtgcaaccctggtggctctctccacagggcaaggcgtggacctcttcatgcttgacccggctcttggtgaatttgtcctggtggaaaaagatgtcaagattaagaagaaaggaaagatttacagcctgaatgagggctatgccaagtattttgatgcggccaccactgaatatgtgcagaaaaagaaattccctgaggatggcagtgctccctatggggccaggtatgtgggctccatggtggctgacgtgcaccgcaccctggtctatggaggaatcttcctgtacccagccaaccagaagagccctaagggcaagctccggctcctgtatgaatgcaatcccgtggcctacatcattgagcaggcaggaggcttggcgaccacggggacccagcctgtactggacgtgaagcccgaggcaattcaccagcgagtccccctcattctggggtcaccagaggatgtgcaggaatatctcacctgtgtgcagaaaaatcaggcaggcagctagcgagtttgaccccacatgccctcttctgtttgtcttgcaccttgtctaaggaccctaaatgaacgataaacagagatggtagctatgagtatacaaaaggtaaatccacttaatcacatacagaagagcaacaacaaactgcttacgacaggtttggaagccacaggcgattctatggtcaatgtgaaggactagaaataaaaacccacatgtggaaa

SEQ ID NO: 124 - DNA, 3346 bp, Homo sapiens
actcttgagatactgactggaagatagactgttttgttccacctgattgtatgggagaaatttttgaccttagaaagtggaaatgaggttgctatggaaactggtaattctgctgccactcataaactcttctgcaggtgatggtcttttaagccgtcctatttttactcaggagccacatgatgtcatttttcctttggatttatcaaaatctgaggtcatcctgaattgtgctgctaatggttacccttcgcctcattataggtggaagcaaaatggcacagacattgattttactatgagttatcactacaggttggatggaggcagtcttgcaatcaatagcccccacacagatcaagatattggcatgtaccagtgcctggccaccaatcttctggggacaattctgagtcggaaggcaaagctccaatttgcatatattgaagactttgaaactaaaacaagaagcacagtatctgtccgagaaggtcaaggtgtggtgcttctctgtggcccaccgccacattttggagatttatcttatgcatggaccttcaatgataaccccttatacgtccaagaggacaataggcgatttgtatctcaagagacgggaaacttgtacattgccaaagtggaaccatcagatgtgggcaactacacttgctttataactaacaaagaggcccagagaagtgttcaaggtccacccactccattagtgcagcgcactgatggtgtgatgggggaatatgaaccaaagattgaagtgcgttttcctgaaactatacaagctgcaaaggattcatctgtaaaactggaatgttttgcccttggaaatccagtccccgatattagttggagaaggttggacgggagcccgttgccagggaaagtcaagtacagcaaatcccaagctatccttgaaatcccgaacttccaacaagaagatgaaggcttttatgagtgcattgcaagcaaccttcgaggaagaaaccttgcaaagggtcaactcattttttatgctcctccagaatgggaacagaaaatccaaaatacacacctctctatctatgacaacttgctctgggaatgtaaagctagtggaaagccaaacccttggtatacatggttaaaaaatggtgaacgactcaacccagaggagagaattcaaatagaaaatgggacactcatcataacgatgctgaatgtgtcagattctggtgtgtaccaatgtgctgcagaaaacaaatatcagataatttatgcaaatgctgaattgagagttttagcctcagctccagatttctccaaaagtccagttaaaaaaaagtcttttgttcaagttggtggggatattgttatcggatgcaaaccaaatgcttttcccagggcagctatctcttggaaaagaggaacggagacccttagacaaagcaaaagaatatttctcttggaggatggcagcctcaagatatataatattaccaggtcagatgctggatcatatacatgcatagccacaaatcagtttggcactgcaaagaacactggcagcctcattgtaaaagagagaactgtcattaccgtcccaccttccaaaatggatgttacagttggcgagagtatagtgctaccatgccaggtgtcccatgacccctccattgaagtggtatttgtatggtttttcaatggagatgtcatagacttaaaaaaaggagtggctcattttgaaaggattggaggagaatctgttggggatttgatgataaggaatattcagttacatcattcaggaaaatatctctgcacagtacaaacaaccctagaaagtttatctgcagtagccgatatcattgttagaggtccaccaggtcctcctgaggatgtgcaagtggaagacatttccagtactacttctcaactaagttggagagcaggcccagataataacagtcccattcaaatatttactattcagactcggacaccattttctgtgggttggcaggctgttgctacagttccagaaattctcaatggtaagacatacaatgcaacagtggttggtttgagtccttgggtggaatatgaatttcgtgttgttgccggcaacagcattgggattggagaaccaagtgaaccatcagaattgttaagaactaaagcatcagtccctgttgtggcaccagtaaacatccatggaggtggaggaagtcggtctgaactcgtcattacgtgggagtcaattccagaagaactgcagaatggggagggatttggatatatcatcatgttccggccagtgggctcgacaacctggtccaaggagaaagtgtcatctgtggaatcatcaaggtttgtctacagaaatgaaagcatcatcccactgtctccctttgaagtcaaagtgggtgtgtataataatgaaggagaaggatccctgagtactgtgaccattgtctactcgggggaagatgaacctcaactggccccaaggggaacttctctccagagtttttctgcttctgaaatgggaggtttcatggaatgctattgcctggaatagaaacactggaagagtgctgggctatgaggtcttatactggacagatgactccaaagaatccatgataggtaaaattagagtcagtggaaatgtcacaaccaaaaacatcacggggctgaaagctaataccatctactttgcttccgtaagagcttacaacactgctgggacagggccctcaagccccccagtcaatgttaccaccaaaaagtctcctccaagccaaccaccagcaaacattgcctggaagctgacaaactctaaattatgcttgaactgggagcatgtaaaaaccatggaaaatgagtctgaagttttggggtacaagattctgtaccggcaaaacagacagagtaaaactcatattttggaaacaaacaatacatcagctgagcttctggttccatttgaagaagactacttaattgaaataagaacagtcagtgatggtggagatggaagcagcagtgaggaaattaggattccaaaaatgtcaagtttgagttccagaggaattcaattcttagaacctagcacccattttctttccattgtcattgtgatttttcactgttttgctattcagccacttatctgatgaataaaaccataaatctttgagagttttttgaaagcaaatcattctgtatatatgctctccagcctctgacacaagatgcgttcttaatacagacttgtttgcaaagaaaaaaaaaagtatattattaaaatcctgtaaatatctatggtatattaataaaacaattttaaaca

SEQ ID NO: 125 - DNA, 2587 bp, Homo sapiens
ggttggacgtgataagtatgagcctgcagctgtttcagaacaaggtgataaaaagggcaaaaagggcaaaaaagacagggacatggatgaactgaagaaagaagtttctatggatgatcataaacttagccttgatgaacttcatcgtaaatatggaacagacttgagccggggattaacatctgctcgtgcagctgagatcctggcgcgagatggtcccaacgccctcactccccctcccactactcctgaatggatcaagttttgtcggcagctctttggggggttctcaatgttactgtggattggagcgattctttgtttcttggcttatagcatccaagctgctacagaagaggaacctcaaaacgataatctgtacctgggtgtggtgctatcagccgttgtaatcataactggttgcttctcctactatcaagaagctaaaagttcaaagatcatggaatccttcaaaaacatggtccctcagcaagcccttgtgattcgaaatggtgagaaaatgagcataaatgcggaggaagttgtggttggggatctggtggaagtaaaaggaggagaccgaattcctgctgacctcagaatcatatctgcaaatggctgcaaggtggataactcctcgctcactggtgaatcagaaccccagactaggtctccagatttcacaaatgaaaaccccctggagacgaggaacattgccttcttttcaaccaattgtgttgaaggcaccgcacgtggtattgttgtctacactggggatcgcactgtgatgggaagaattgccacacttgcttctgggctggaaggaggccagacccccattgctgcagaaattgaacattttatccacatcatcacgggtgtggctgtgttcctgggtgtgtctttcttcatcctttctctcatccttgagtacacctggcttgaggctgtcatcttcctcatcggtatcatcgtagccaatgtgccggaaggtttgctggccactgtcacggtctgtctgacacttactgccaaacgcatggcaaggaaaaactgcttagtgaagaacttagaagctgtggagaccttggggtccacgtccaccatctgctctgataaaactggaactctgactcagaaccggatgacagtggcccacatgtggtttgacaatcaaatccatgaagctgatacgacagagaatcagagtggtgtctcttttgacaagacttcagctacctggcttgctctgtccagaattgcaggtctttgtaacagggcagtgtttcaggctaaccaggaaaacctacctattcttaagcgggcagttgcaggagatgcctctgagtcagcactcttaaagtgcatagagctgtgctgtggttccgtgaaggagatgagagaaagatacgccaaaatcgtcgagatacccttcaactccaccaacaagtaccagttgtctattcataagaaccccaacacatcggagccccaacacctgttggtgatgaagggcgccccagaaaggatcctagaccgttgcagctctatcctcctccacggcaaggagcagcccctggatgaggagctgaaagacgcctttcagaacgcctatttggagctggggggcctcggagaacgagtcctaggtttctgccacctctttctgccagatgaacagtttcctgaagggttccagtttgacactgacgatgtgaatttccctatcgataatctgtgctttgttgggctcatctccatgattgaccctccacgggcggccgttcctgatgccgtgggcaaatgtcgaagtgctggaattaaggtcatcatggtcacaggagaccatccaatcacagctaaagctattgccaaaggtgtgggcatcatctcagaaggcaatgaacctatgagcagaggaaaatcgtggagttcacctgccacacagccttcttcgtcagtatcgtggtggtgcagtgggccgacttggtcatctgtaagaccaggaggaattcggtcttccagcaggggatgaagaacaagatcttgatatttggcctctttgaagagacagccctggctgctttcctttcctactgccctggaatgggtgttgctcttaggatgtatcccctcaaacctacctggtggttctgtgccttcccctactctcttctcatcttcgtatatgacgaagtcagaaaactcatcatcaggcgacgccctggcggctgggtggagaaggaaacctactattagccccccgtcctgcacgccgtggagcatcaggccacacactctgcatccgacacccaccccctctttgtgtacttcagtcttggagtttggaactctaccctggtaggaaagcaccgcagcatgtggggaagcaagacgtcctggaatgaagcatgtagctctatggggggaggggggagggctgcctgaaaaccatccatctgtggaaatgacagcggggaaggtttttatgtgcctttttgtttttgtaaaaaaggaacacccggaaagactgaaagaatacattttatatctggatttttacaaataaagatggctattataatgg

SEQ ID NO: 126 - DNA, 1977 bp, Homo sapiens
atgaggtctgacaagtcagctttggtatttctgctcctgcagctcttctgtgttggctgtggattctgtgggaaagtcctggtgtggccctgtgacatgagccattggcttaatgtcaaggtcattctagaagagctcatagtgagaggccatgaggtaacagtattgactcactcaaagccttcgttaattgactacaggaagccttctgcattgaaatttgaggtggtccatatgccacaggacagaacagaagaaaatgaaatatttgttgacctagctctgaatgtcttgccaggcttatcaacctggcaatcagttataaaattaaatgatttttttgttgaaataagaggaactttaaaaatgatgtgtgagagctttatctacaatcagacgcttatgaagaagctacaggaaaccaactacgatgtaacgcttatagaccctgtgattccccgtggagacctgatggctgagttgcttgcagtcccttttgtgctcacacttagaatttctctaggaggcaatatggagcgaagctgtgggaaacttccagctccactttcctatgtacctgtgcctatgacaggactaacagacagaatgacctttctggaaagagtaaaaaattcaatgctttcagttttgttccacttctggattcaggattacgactatcatttttgggaagagttttatagtaaggcattaggaaggcccactacattatgtgagactgtgggaaaagctgagatatggctaatacgaacatattgggattttgaatttcctcaaccataccaacctaactttgagtttgttggaggattgcactgtaaacctgccaaagctttgcctaaggaaatggaagaatttgtccagagctctgatgaggatggtgttgttgtgttttctctggagtcagttgtgcaaaaccttacagaagaaaaggttgatcttatcacttcaggcctggctcagattccacaaaaagtcagtagaacctccaatccttataagaagctattcacacaatggagaaaaaaatggaagcagtttgtgcagagctctggagaaaatggtgtcgtggcagtcttgcttaagtctatggtcagtaacatcacagaagaaagggccaacgtgattgcatcagctcttgcccagattccacgaaagctgattgacaatttctttagagttctaacatcttatagctttggcattctactcatggaacaagatattttctttaccccaacaggttctgtggatggaaagagaccaaatactttagcatccaatactcagctgtacaagtggatatcccagaatgaccttcttggtcatccaaaaactaaatcttttatgactcatggtgaaaccagtggcatctatgaggcaatctaccatgggatccctatggtgggcattcctttgtttgcagatcaacctgataacattgctcacatgaaggccctcaatgtggacatcaggaccatgtcaagtacagatttgctcaatgcactgaagacagtcattaatgaccctgtctacaaagagaatgctatgaagttatcaataattcgccatgatttgccaattaagcccctggatcaagcagccttctggattgagtttgtcatgcagcacaaaggagccaagcaccttcgggttgcagcccacgacctcacctggttccaataccacaacttgcatgaaatggaagagtttgtgcagagctctggagaaaatggtattgtggtgttttctctggggtcgatgatcagtaacatgtcagaagaaagtgccaacatgattgcatcagcccttgcccagatcccacaaaagataatggggaaagctgaagtgtggctcattcaaacgtactgggattttgaatttcttcacccacccttaccaaatgtcgattttgtgggggaactccactgtaaaccagccaaaaccctgcctaag

SEQ ID NO: 127 - DNA, 3138 bp, Homo sapiens
ccggccggcgggcgggctccccagccaggccgctgcacctgtcaggggaacaagctggaggagcaggaccctagacctctgcagcccataccaggtctcatggaggggaacaagctggaggagcaggactctagccctccacagtccactccagggctcatgaaggggaacaagcgtgaggagcaggggctgggccccgaacctgcggcgccccagcagcccacggcggaggaggaggccctgatcgagttccaccgctcctaccgagagctcttcgagttcttctgcaacaacaccaccatccacggcgccatccgcctggtgtgctcccagcacaaccgcatgaagacggccttctgggcagtgctgtggctctgcacctttggcatgatgtactggcaattcggcctgcttttcggagagtacttcagctaccccgtcagcctcaacatcaacctcaactcggacaagctcgtcttccccgcagtgaccatctgcaccctcaatccctacaggtacccggaaataaagaggagctggaggagctggaccgcatcacagagcagacgctctttgacctgtacaaatacagctccttcaccactctcgtggccggctcccgcagccgtcgcgacctgcgggggactctgccgcaccccttgcagcgcctgagggtcccgcccccgcctcacggggcccgtcgagcccgtagcgtggcctccagcttgcgggacaacaacccccaggtggactggaaggactggaagatcggcttccagctgtgcaaccagaacaaatcggactgcttctaccagacatactcatcaggggtggatgcggtgagggagtggtaccgcttccactacatcaacatcctgtcgaggctgccagagactctgccatccctggaggaggacacgctgggcaacttcatcttcgcctgccgcttcaaccaggtctcctgcaaccaggcgaattactctcacttccaccacccgatgtatggaaactgctatactttcaatgacaagaacaactccaacctctggatgtcttccatgcctggaatcaacaacggtctgtccctgatgctgcgcgcagagcagaatgacttcattcccctgctgtccacagtgactggggcccgggtaatggtgcacgggcaggatgaacctgcctttatggatgatggtggctttaacttgcggcctggcgtggagacctccatcagcatgaggaaggaaaccctggacagacttgggggcgattatggcgactgcaccaagaatggcagtgatgttcctgttgagaacctttacccttcaaagtacacacagcaggtgtgtattcactcctgcttccaggagagcatgatcaaggagtgtggctgtgcctacatcttctatccgcggccccagaacgtggagtactgtgactacagaaagcacagttcctgggggtactgctactataagctccaggttgacttctcctcagaccacctgggctgtttcaccaagtgccggaagccatgcagcgtgaccagctaccagctctctgctggttactcacgatggccctcggtgacatcccaggaatgggtcttccagatgctatcgcgacagaacaattacaccgtcaacaacaagagaaatggagtggccaaagtcaacatcttcttcaaggagctgaactacaaaaccaattctgagtctccctctgtcacgatggtcaccctcctgtccaacctgggcagccagtggagcctgtggttcggctcctcggtgttgtctgtggtggagatggctgagctcgtctttgacctgctggtcatcatgttcctcatgctgctccgaaggttccgaagccgatactggtctccaggccgagggggcaggggtgctcaggaggtagcctccaccctggcatcctcccctccttcccacttctgcccccaccccatgtctctgtccttgtcccagccaggccctgctccctctccagccttgacagcccctccccctgcctatgccaccctgggcccccgcccatctccagggggctctgcaggggccagttcctccgcctgtcctctgggggggccctgagagggaaggagaggtttctcacaccaaggcagatgctcctctggtgggagggtgctggccctggcaagattgaaggatgtgcagggcttcctctcagagccgcccaaactgccgttgatgtgtggaggggaagcaagatgggtaagggctcaggaagttgctccaagaacagtagctgatgaagctgcccagaagtgccttggctccagccctgtaccccttggtactgcctctgaacactctggtttccccacccaactgcggctaagtctctttttcccttggatcagccaagcgaaacttggagctttgacaaggaactttcctaagaaaccgctgataaccaggacaaaacacaaccaagggtacacgcaggcatgcacgggtttcctgcccagcgacggcttaagccagcccccgactggcctggccacactgctctccagtagcacagatgtctgctcctcctcttgaacttgggtgggaaaccccacccaaaagccccctttgttacttaggcaattccccttccctgactcccgagggctagggctagagcagacccgggtaagtaaaggcagacccagggctcctctagcctcatacccgtgccctcacagagccatgccccggcacctctgccctgtgtctttcatacctctacatgtctgcttgagatatttcctcagcctgaaagtttccccaaccatctgccagagaactcctatgcatcccttagaaccctgctcagacaccattacttttgtgaacgcttctgccacatcttgtcttccccaaaattgatcactccgccttctcctgggctcccgtagcacactataacatctgctggagtgttgctgttgcaccatactttcttgtacatttgtgtctcccttcccaactagactgtaagtgccttgcggtcagggactgaatcttgcccgtttatgtatgctccatgtctagcccatcatcctgcttggagcaagtaggcaggagctcaataaatgtttgttgcatgaaggaa

SEQ ID NO: 128 - DNA, 1528 bp, Homo sapiens
cttttcagagttgagaatggagagaatgttacctctcctggctctggggctcttggcggctgggttctgccctgctgtcctctgccaccctaacagcccacttgacgaggagaatctgacccaggagaaccaagaccgagggacacacgtggacctcggattagcctccgccaacgtggacttcgctttcagcctgtacaagcagttagtcctgaaggcccctgataagaatgtcatcttctccccactgagcatctccaccgccttggccttcctgtctctgggggcccataataccaccctgacagagattctcaaaggcctcaagttcaacctcacggagacttctgaggcagaaattcaccagagcttccagcacctcctgcgcaccctcaatcagtccagcgatgagctgcagctgagtatgggaaatgccatgtttgtcaaagagcaactcagtctgctggacaggttcacggaggatgccaagaggctgtatggctccgaggcctttgccactgactttcaggactcagctgcagctaagaagctcatcaacgactacgtgaagaatggaactagggggaaaatcacagatctgatcaaggaccttgactcgcagacaatgatggtcctggtgaattacatcttctttaaagccaaatgggagatgccctttgacccccaagatactcatcagtcaaggttctacttgagcaagaaaaagtgggtaatggtgcccatgatgagtttgcatcacctgactataccttacttccgggacgaggagctgtcctgcaccgtggtggagctgaagtacacaggcaatgccagcgcactcttcatcctccctgatcaagacaagatggaggaagtggaagccatgctgctcccagagaccctgaagcggtggagagactctctggagttcagagagataggtgagctctacctgccaaagttttccatctcgagggactataacctgaacgacatacttctccagctgggcattgaggaagccttcaccagcaaggctgacctgtcagggatcacaggggccaggaacctagcagtctcccaggtggtccataaggctgtgcttgatgtatttgaggagggcacagaagcatctgctgccacagcagtcaaaatcaccctcctttctgcattagtggagacaaggaccattgtgcgtttcaacaggcccttcctgatgatcattgtccctacagacacccagaacatcttcttcatgagcaaagtcaccaatcccaagcaagcctagagcttgccatcaagcagtggggctctcagtaaggaacttggaatgcaagctggatgcctgggtctctgggcacagcctggcccctgtgcaccgagtggccatggcatgtgtggccctgtctgcttatccttggaaggtgacagcgattccctgtgtagctctcacatgcacaggggcccatggactcttcagtctggagggtcctgggcctcctgacagcaataaataatttcgttggac

SEQ ID NO: 129 - DNA, 1852 bp, Homo sapiens
cgcccccagagtctggctttccgcggctgcccgcctcgcgcgtcttccctgcccgggtctcctcgctgtcgccgccgctgccacaccatggccttcgtcaccaggcagttcatgcgttccgtgtcctcctcgtccaccgcctcggcctcggccaagaagataatcgtcaagcacgtgacggtcatcggcggcgggctgatgggcgccggcattgcccaggttgctgcagcaactggtcacacagtagtgttggtagaccagacagaggacatcctggcaaaatccaaaaagggaattgaggaaagccttaggaaagtggcaaagaagaagtttgcagaaaaccctaaggccggcgatgaatttgtgggagaagaccctgagcaccatagcgaccagcacggatgcagcctcccgttgtccacagcacagacttgggtggtggaagcccttcgtggagaatctggaaggtgaaaaacgagctcttcaaaaggctgggacaagtttgctgctgaacatacaatctttgccagcaacacttcctccttgcagattacaagcatagctaatgccaccaccagacaagaccgattcgctggcctccatttcttcaacccagtgcctgtcatgaaacttgtggaggtcattaaaacaccaatgaccagccagaagacatttgaatctttggtagactttagcaaagccctaggaaagcatcctgtttcttgcaaggacactcctgggtttattgtgaaccgcctcctggttccatacctcatggaagcaatcaggctgtatgaacgaggtgacgcatccaaagaagacattgacactgctatgaaattaggagccggttaccccatgggcccatttgagcttctagattatgtcggactggatactacgaagttcatcgtggatgggtggcatgaaatggatgcagagaacccattacatcagcccagcccatccttaaataagctggtagcagagaacaagttcggcaagaagactggagaaggattttacaaatacaagtgatgtgcagcttctccggctctgagaagaacacctgagagcgctttccagccagtgccccgagtgcctgtgggaatgctctttggtcagacattccctcacacagtacagtttaataaatgtgcattttgattgtaatctatcgaagtgattattacaccagttacagcagtaatagattctccattaagaaataattcccttttttagtctgttcatttctgtgtattttctaaacagctttacacccttggtgccttggagcaaacatgttttttgaaccttgtcatttttgtgaagaattgcctagattccttctctcatcaacgggaaagtacttcctctgagagtgcgagtgcaccatgctcactgttgctgcgtgggagagtcacaagccactggcaagcaagtggtatagtctgtgaagcactgcagcgagcagcacctggatcttgcctttataagaacattttactacctgcagctttgagtcttgccctacattttgggcatgacataagatgtgtctttattcagctcgtcgtgaagatgctgctgctgaatgggtcagcatatctctgtttgcatggtttgcaggaggtcggttttcatggtcattcagttccacagatctgaatgattactgtctgtctgtgtcttttttccatgagaaatcactgttgcaaattgcctataaattgactctactaaaataacaatgtttcagtctgaaaatttgaattgaaaaaaatgtataatataaaattgtaatacactcaaatgattataaaagtaaaagttggtaatttaggcagaa

SEQ ID NO: 130 - DNA, 587 bp, Homo sapiens
cctacttctgcttcctcctggccgctctgggtgtgacagctggtgcccatcgcttgtggagccacaggtcctaccgggccaagctgcctctgaggatatttctggctgtcgccaactccatggctttccagcgggtcctcatggtgatatggtgtcttgccctgtactataagatctccgtggtgctcatgtgctttgtggtccccacgctggtgccctggtacatctggggagagagtctgtggaattcctacttcttggcctctattctccgctataccatctcactcaacatcagctggctggtcaacagcgccgcccacatgtatggaaaccggccctatgacaagcacatcagccctcggcagaacccactcgtcgctctgggtgccattggtgaaggcttccataattaccatcacacctttccctttgactactctgcgagtgaatttggcttaaattttaacccaaccacctggttcattgatttcatgtgctggctggggctggccactgaccgcaaacgggcaaccaagccgatgatcgaggcccggaaggccaggactggagacagcagtgcttga

SEQ ID NO: 131 - DNA, 3972 bp, Homo sapiens
gccctttgatttaacctgactaatattgacagatgctttacccagatcattcttagagcttgatttctgaaacatggggagcttttgcagcaatttttattctgtatcgatggggcatcatccttgagataatagtaagtaatcttggtcctgaaatcattacaatttcatattgaattgctttatgttacttcctctattatgccaggcttctgttccttggttttttttttttcttttctgtttggttcttctaagttaaattccttctggcggtataaaatagatgttaagtttatgtgctctggagctggagtgggttcaaattccaggtcagtcactcactagccatggagcctcggcaattatttctgtgattctgtttccccatctggaaataatgatgataataccacttatctcatagcattgcagtgagaataagatgagtcaatacttgtaaggtatgtagcacaatgtctaacatatagtaagcactatgtaagtatgggctattttatataatatttccagggcatatgagaataggtgagcaagatattgcttcttcatttgtcactagtagttttcaacatcactatgattatcaaattcccagaaaaaatgtaataattcattgggcatttgttagctttgatgaatacttttcagaaggatttcttagttcttttaatgtgtgatgttgaaaataggttgtgattacagtcattcttgtctttgggtagtgaacattaagtcaagttgaaacattattcaggctgataagctaagtgcagcagatattatagccattgataaattaatatttactgagtgagcattcagaggtagaagttgctaatttctatgttagatactatcttatgtgtctatattgtccttgtcccttttgaaatattcttttgagtgacatattatggccatttgataccattcaagtgaaatatttctgtatcttttgggttttgacagttgaaatattgattatatgtagtttagttaactatatattgttatgcatagttataggtcatacatatgtatatatttaattcctatttggagttttaatagtgtcctagaatgttctcctcattgtaatcatatttaaaaaccattttatgcccaaaataaaaaaagaaaaccccacgaaaccccctaaagccttaaaataaactttctttgatttcttctcttttggtttgtgtttctgtttttccagaaaatgttcctgagaaagatcttcatggaagactttttatcaaccgtatttttcatatcagtgctgacagaatgtttgaattgctctttaccagttcacgctttatgcagaaatttgccagttctagaaatataatagatgtagtatctaccccttggactgcagaacttggaggtgatcagctgagaacgatgacctacactatagtccttaatagtccacttactggaaaatgcactgctgccactgaaaagcagacactgtataaagaaagtcgggaagcacgattttatttggtagattcagaagtactgacacatgatgtcccctaccatgattacttctataccgtgaacagatactgtatcatccgatcttcaaaacagaaatgcaggctaagagtttccacagatttgaaatacagaaaacagccatggggccttgtcaaatctttaattgaaaagaattcctggagttctttggaggactatttcaaacagcttgaatcagatttgttaattgaagaatctgtattaaatcaggccattgaagaccctggaaaacttactggcctacgaaggagaaggcgaaccttcaatcgaacagcagaaacagttcctaaactttcctctcagcattcctctggagatgtgggcttaggtgccaaaggggatattacaggaaagaaaaaggaaatggaaaactataacgtcactcttattgtggtaatgagtatttttgtgttgttattagttttgttgaatgtgacactgtttctgaagctgtcaaagatagaacatgctgctcagtccttttaccgtctccgcctccaagaagagaaatctttaaatttagcctctgatatggtgtcaagagcagaaactattcagaagaataaagatcaggcccatcgtttaaagggagtgctccgagactccatagtgatgcttgaacagctgaagagctcactcattatgcttcagaaaacgtttgatctactaaataagaataagactggcatggctgttgaaagctagtgatctgaaggactaaaaccgcagagatacttggaacttaaagaaaatacctggaagaaaaccagacgaatgaaggattttggcatagaacatttctatgttttttcattattgagatttctaatatgaacatttctttcagtaacatttatttgataattagtttctgctggccttaataatccatcctttcacttcttatagatatttttaagctgtgaatttcttcagtgaaccatgaaatatattatagaactgaatttctctgatacaaaaagaaaatgacacaccctgaattgagtggtatggtctcatttctacagtgaagtctgatgctttgttagcacagaatccgtacatgtccaataggtcgcttttgtaactgagataagaccaagaggataaacaggacaatataagaagaaacctctatgtcattactgattttaaaggttctgttttcaggcatataacatttccaggtttgtgtactgtaaagattataatgtcttcatttatttagcatgcaaatttaatagtcaaactttttgaatctgcatgttgatgatgattatcagaaagggtcttctgccatgctgtatctttatgaaagaaatagttgttttttcttaaggtaactatcagaggtgggattatcttgcctcctcacttagaataccaacagtcaaaaggaagaaccatcctctgagttttaaaaaccagaaggttatgttaaaatctgggcatttagtgacagatcaaatgcatacttgaactaagattggcttcagcttagcagtctttcatggtggaagtgacacatctggttgaaaataatttgtgtattttcagtaaccatgtatggcttccttctttatgtatgtgtgtgacttgttttgattggtaagttataagccagacatagattttagctctttaataaaaacttcaggggcacgtatgtcccagtacaagtgtactgactatcaagttttaactcagatgcaagctttggctctttcataaaaagtttttatgcatatgtgtctccatacaagtggctcattaaaataagaactttgtaaactgacttaaaatcagatattttttcaagagttagggaaagttgaagtgttttactgttttgtctcttgagccctttctctggggaaaaaatacatatccatctatctatctatatataaactgtgtatacattcttactgtttgaacaactattgcctttaattaaatgtttcatttttctccagagtccccaaagccacatggcattattatagtcatttttgagatgcctgtagagaatgaaagtattgactccgttagagggaaaatgggtttctctgggtgaattccaacgaagcatacctaggggtaacagtgaacctacctgggtttgttttgttttggtaaggatttatgtagtgtctggctgtaagcaagaatgagtggattataaacttgaagatttctctgttaaagtcacaaaaatgatcgacaaacaatatttttgtgatgtttatttaaacgttgtattttataacatacttcaaggaagagtatcgaagtaagttgctttataaattaagactaaattcgtatggatgcagaattcaattaataaaatttgagcctgttacgtaaattgaatattaataaaattgaaaattt

SEQ ID NO: 132 - DNA, 1785 bp, Homo sapiens
atgtggtgtctcctacgaggcctgggccggcctggagccctggcacggggagccctggggcagcagcaatccctgggtgcccgggccctggccagcgcaggctctgagagccgggacgagtacagctatgtggtggtgggcgcgggctcggcgggctgcgtgctggctgggaggctcacggaggaccccgccgagcgcgtgctgctgctggaggccgggcccaaggacgtgcgcgcggggagcaagcggctctcgtggaagatccacatgcccgcggccctggtggccaacctgtgcgacgacaggtacaactggtgctaccacacagaggtgcagcggggcctggacggccgcgtgctgtactggccacgcggccgcgtctggggtggctcctcatccctcaatgccatggtctacgtccgtgggcacgccgaggactacgagcgctggcagcgccagggcgcccgcggctgggactacgcgcactgcctgccctacttccgcaaggcgcagggccacgagctgggcgccagccggtaccggggcgccgatggcccgctgcgggtgtcccggggcaagaccaaccacccgctgcactgcgcattcctggaggccacgcagcaggccggctacccgctcaccgaggacatgaatggcttccagcaggagggcttcggctggatggacatgaccatccatgaaggcaaacggtggagcgcagcctgtgcctacctgcacccagcactgagccgcaccaacctcaaggccgaggccgagacgcttgtgagcagggtgctatttgagggcacccgtgcagtgggcgtggagtatgtcaagaatggccagagccacagggcttatgccagcaaggaggtgattctgagtggaggtgccatcaactctccacagctgctcatgctctctggcatcgggaatgctgatgacctcaagaaactgggcatccctgtggtgtgccacctacctggggttggccagaacctgcaagaccacctggagatctacattcagcaggcatgcacccgccctatcaccctccattcagcacagaagcccctgcggaaggtctgcattggtctggagtggctctggaaattcacaggggagggagccactgcccatctggaaacaggtgggttcatccgcagccagcctggggtcccccacccggacatccagttccatttcctgccatcccaagtgattgaccacgggcgggtccccacccagcaggaggcttaccaggtacatgtggggcccatgcggggcacgagtgtgggctggctcaaactgagaagtgccaatccccaagaccaccctgtgatccagcccaactacttgtcaacagaaactgatattgaggatttccgtctgtgtgtgaagctcaccagagaaatttttgcacaggaagccctggctccgttccgagggaaagagctccagccaggaagccacattcagtcagataaagagatagatgcctttgtgcgggcaaaagccgacagcgcctaccacccctcgtgcacctgtaagatgggccagccctccgatcccactgccgtggtggatccgcagacaagggtcctcggggtggaaaacctcagggtcgtcgatgcctccatcatgcctagcatggtcagcggcaacctgaacgcccccacaatcatgatcgcagagaaggcagctgacattatcaaggggcagcctgcactctgggacaaagatgtccctgtctacaagcccaggacgctggccacccagcgctaa

SEQ ID NO: 133 - DNA, 1519 bp, Homo sapiens
  misc_feature (292)..(292): n can be a, c, g or t
gcagatgtgagaactcaaggttcagggctgctcttctaagaaacaagtctgccataatctccatctgtgttggaatctgttaactaatgaactggtctctgtgcaaatcctgagtgctaaagcttccaacaagactgatgctagctcgtgtcaccaggaagatgctacgtcatgccaagtgttttcagcgcctagcaatttttggttctgtgagggcactgcataaagataatagaacagcaacccctcagaatttctccaactatgaatccatgaaacaggacttcaaacntggggattccagagtatttcaactttgctaaagatgtcctggaccaatggactgataaggaaaaggctggaaagaaaccttcaaatccagccttctggtggatcaacagaaatggagaagagatgcgatggagttttgaggaactgggatctctgtccagaaaatttgccaatatactttcagaagcctgttccctacaaagaggagatcgggtaattctgattctgcccagggtcccagagtggtggcttgcaaatgtggcctgtctgcgaacagggacagttttaattccaggaaccactcagctgacccagaaagacattctctacagactacaatcttcaaaagcaaactgcattatcaccaatgatgttttagccccagcagtagacgctgttgcatccaaatgtgaaaatctgcactccaagctgattgtatcagagaactccagagaggggtgggggaacctcaaggagttgatgaaacatgccagtgacagccacacctgtgtgaagacaaaacacaatgagatcatggccatattctttaccagtggaacaagtggatatccgaaaatgactgcacacacccacagcagtttttggtttaggattatctgtaaatggaaggttctggctagatttgacaccctcagatgtgatgtggaatacctcagatacgggctgggcaaagtctgcatggagtagtgttttttctccgtggatccagggagcatgtgtattcacacaccatttaccccgttttgagccgacttctatcttgcaaacactctccaagtaccccatcacagtcttctgttcagcaccaactgtataccgaatgcttgtacagaatgatataaccagctataagtttaaaagcttaaagcactgtgtgagtgctggggaaccaattacccctgacgtgactgaaaaatggagaaacaagacgggcctggatatctacgaaggatatggacagactgaaacggtgctaatctgtggaaattttaagggaatgaaaattaaacctggctcaatgggaaaaccttctcctgctttcgatgttaaggtttgcacatccccttccaggagaatgtttaacaacccaatctgtacactacctacctaccgcttacccccatataaactttctttgttatgatggtgattccattttacttccatgatactttaatttttataaatatgtgaaaatgattagaaa

SEQ ID NO: 134 - DNA, 348 bp, Homo sapiens
aatggaccccaactgctcctgtgccgctgtctcctgcacctgcgccagctcctgcaagtgcaaagagtgcaaatgcacctcctgcaagaagagctgctgctcctgctgccctgtgggctgtgccaagtgtgcccagggctgcatctgcaaaggggcatcggagaagtgcagctgctgcgcctgatgtcgggacagccctgctcccaagtacaaatagagtgacccgtaaaatccaggattttttgttttttgctacaatcttgacccctttgctacattccctttttttctgtgaaatatgtgaataataattaaacacttagacttgaaaaaaaaaaaaaaaaaaaa

SEQ ID NO: 135 - DNA, 2198 bp, Homo sapiens
cagaccattgagatgtggaagctgttgctgtgggttgggctggttcttgtgctgaaacaccacgatggtgctgcccataaactcgtgtgttatttcaccaactgggcacacagtcggccaggccctgcctcgatcttgccccatgacctggacccctttctctgcacccacctgatatttgcctttgcctcaatgaacaacaatcagattgttgctaaggatctccaggatgagaaaattctctacccagagttcaacaaactaaaggagaggaacagagagctgaaaacactactgtccatcggcgggtggaactttggcacctcaagattcaccactatgttgtccacatttgccaaccgtgaaaagtttattgcttcagttatatcccttctgaggacacatgactttgatggtcttgaccttttcttcttatatcctggactaagaggcagccccatgcatgaccggtggacttttctcttcttaattgaagagctcctgtttgccttccggaaggaggcactgctcaccatgcgcccgaggctgctgctgtctgctgctgtttctggggtcccacacatcgtccaaacatcctatgatgtgcgctttctaggaagactcctggatttcatcaatgtcttgtcttatgacttacatggaagttgggaaaggttcacaggacataatagccccctcttctctctgcctgaagaccccaaatcttcggcatatgctatgaattattggagaaagcttggggcaccctcagagaagctcatcatggggatccccacctatggacgtacctttcgcctcctcaaagcctctaagaatgggttgcaggccagagcgatcggaccagcatctccagggaagtacaccaagcaagaaggcttcttggcttattttgagatttgttcctttgtctggggagcgaagaagcactggattgattaccagtatgtcccgtatgccaacaaggggaaagagtgggttggctatgacaatgccatcagcttcagttacaaggcatggtttataaggcgagagcattttgggggggccatggtgtggacattggacatggatgacgtcaggggcacgttctgtggcactggccctttcccccttgtctacgtattgaatgatatcctggtgcgggctgagttcagttcaacttctttaccacaattttggctgtcatctgctgtgaattcttcaagcactgaccctgaaaggctggctgtgaccacggcatggaccactgatagtaagattttgcccccaggaggagaggctggggtcactgagatccacggaaagtgtgaaaatatgactataacccctagaggtacaactgtgacccctacaaaggaaactgtatcccttggaaagcacactgtagctctaggagagaagactgagatcactggggcaatgaccatgacttctgtgggtcatcagtccatgacccctggagagaaggccctgacccctgtgggtcatcaatctgtgaccactggacagaagaccctgacctctgtgggttatcagtctgtgacccctggggaaaagaccctgacccctgtgggtcatcagtctgtgacccctgtgagtcatcagtctgtgagccctggaggaacgactatgacccctgtccattttcagactgagacccttagacagaatacagtggcccctagaaggaaggctgtggcccgtgaaaaggtgactgtcccctccagaaacatatcagtcacccctgaagggcagactatgcctttaagaggggagaatttgacttctgaggtgggcactcaccccaggatgggtaacttgggtcttcagatggaagctgaaaacaggatgatgctgtcctccagccccgtcatccagctcccggaacaaactcctctagcttttgacaaccgctttgttcccatctatggaaaccattcctctgtcaactcagtaacccctcaaacaagtcctctttctctaaaaaaagaaatcccagaaaactctgctgtggatgaagaagcctaagcccctctggtgtcagaaaccagggaaaacccttgtcttttcttctaagtgacatgttggaagccttctcatcccggggcaaagcaggcatcaaaaccagaataggccaatctcttttccattaaataaactgtaaacacaagaaccca

SEQ ID NO: 136 - DNA, 426 bp, Homo sapiens
atggcagcagaaccactgacagagctagaggagtccattgagaccgtggtcaccaccttcttcacctttgcaaggcaggagggccggaaggatagcctcagcgtcaacgagttcaaagagctggttacccagcagttgccccatctgctcaaggcgctggctgtgctggtcactaccttccacaagtactcctgccaagagggcgacaagttcaagctgagtaagggggaaatgaaggaacttctgcacaaggagctgcccagctttgtgggggagaaagtggatgaggaggggctgaagaagctgatgggcagcctggatgagaacagtgaccagcaggtggacttccaggagtatgctgttttcctggcactcatcactgtcatgtgcaatgacttcttccagggctgcccagaccgaccctga

SEQ ID NO: 137 - DNA, 1803 bp, Homo sapiens
atggcggggttctgggtcgggacagcaccgctggtcgctgccggacggcgtgggcggtggccgccgcagcagctgatgctgagcgcggcgctgcggaccctgaagcatgttctgtactattcaagacagtgcttaatggtgtcccgtaatcttggttcagtgggatatgatcctaatgaaaaaacttttgataaaattcttgttgctaatagaggagaaattgcatgtcgggttcatgtgaaaatggcggatgaggctgtctgtgttggcccagctcccaccagtaaaagctacctcaacatggatgccatcatggaagccattaagaaaaccagggcccaagctgtacatccaggttatggattcctttcagaaaacaaagaatttgccagatgtttggcagcagaagatgtcgttttcattggacctgacacacatgctattcaagccatgggcgacaagattgaaagcaaattattagctaagaaagcagaggttaatacaatccctggctttgatggagtagtcaagtctgaacttctgtctaattcttccctgctgttaggctaccctgtcatgatcaaggcctcagcaggtggtggtgggaaaggcatgcgcattgcttgggatgatgaagagaccagcatttttttggatgcggagactcgaagagcgatgggagaacaagctgtagctcttgccagagcagtaaaatattcctctgctgggaccgtggagttccttgtggactctaagaagaatttttatttcttggaaatgaatacaagactccaggttgagcatcctgtcacagaatgcattactggcctggacctagtccaggaaatgatccgtgttgctaagggctaccctctcaggcacaaacaagctgatattcgcatcaacggctgggcagttgaatgtcgggtttatgctgaggacccctacaagtcttttggtttaccatctattgggagattgtctcagtaccaagaaccgttacatctacctggtgtccgagtggacagtggcatccaaccaggaagtgttacacataatattgcattacttcgagaggtgataatcaactcacgctttgtaaaaggagacatcagcactaaatttctctccgatgtgtatcctgatggcttcaaaggacacatgctaaccaagagtgagaagaaccagttattggcaatagcatcatcattgtttgtggcattccagttaagagcacaacattttcaagaaaattcaagaatgcctgttattaaaccagacatagccaactgggagctctcagtaaaattgcatgataaagttcataccgtagtagcatcaaacaatgggtcagtgttctcggtggaagttgatgggtcgaaactaaatgtgaccagcacgtggaacctggcttcgcccttattgtctgtcagcgttgatggcactcagaggactgtccagtgtctttctcgagaagcaggtggaaacatgagcattcagtttcttggtacagtgtacaaggtgaatatcttaaccagacttgccgcagaattgaacaaatttatgctggaaaaagtgactgaggacacaagcagtgttctgcgttccccgatgcccggagtggtggtggccgtctctgtcaagcctggagacgcggtagcagaaggtcaagaaatttgtgtgattgaagccatgaaaatgcagaatagtatgacagctgggaaaactggcacggtgaaatctgtgcactgtcaagctggagacacagttggagaaggggatctgctcgtggagctggaatga

SEQ ID NO: 138 - DNA, 1394 bp, Homo sapiens
ctcttgtgcagtgggacttggtgtgcaactccaacaaactgaaggagatggcccagtctatcttcatggcaggtatactgattggagggctcgtgcttggagacctgtctgacaggtttggccgcaggcccatcctgacctgcagctacctgctgctggcagccagcggctccggtgcagccttcagccccaccttccccatctacatggtcttccgcttcctgtgtggctttggcatctcaggcattaccctgagcaccgtcatcttgaatgtggaatgggtgcctacccggatgcgggccatcatgtcgacagcactcgggtactgctacacctttggccagttcattctgcccggcctggcctacgccatcccccagtggcgttggctgcagttaacagtgtccattcccttcttcgtcttcttcctatcatcctggtggacaccagagtccatacgctggttggtcttgtctggaaagtcctcgaaggccctgaagatactccggcgggtggctgtcttcaatggcaagaaggaagagggagaaaggctcagcttggaggagctcaaactcaacctgcagaaggagatctccttggccaaggccaagtacaccgcaagtgacctgttccggatacccatgctgcgccgcatgaccttctgtctttccctggcctggtttgctaccggttttgcctactatagtttggctatgggtgtggaagaatttggagtcaacctctacatcctccagatcatctttggtggggtcgatgtcccagccaagttcatcaccatcctctccttaagctacctgggccggcataccactcaggccgctgccctgctcctggcaggaggggccatcttggctctcacctttgtgcccttggacttgcagaccgtgaggacagtattggctgtgtttgggaagggatgcctatccagctccttcagctgcctcttcctctacacaagtgaattataccccacagtcatcaggcaaacaggtatgggcgtaagtaacctgtggacccgcgtgggaagcatggtgtccccgctggtgaaaatcacgggtgaggtacagcccttcatccccaatatcatctacgggatcaccgccctcctcgggggcagtgctgccctcttcctgcctgagaccctgaatcagcccttgccagagactatcgaagacctggaaaactggtcagtcactgcctctggccccatcagtgctcctccctggggaagcaggtctgggcccagggcttttccttagctctctgtccctaggtccctgcgggcaaagaagccaaagcaggagccagaggtggaaaaggcctcccagaggatccctctacagcctcacggaccaggcctgggctccagctga

SEQ ID NO: 139 - DNA, 447 bp, Homo sapiens
aggatcagaatactttaataagatatcagtgtcaaaatacatttccttataaagttaagctcccgtacagttataatgtcgtcagtaggaatttgacaatgcagtaatggtcatgaagttgttacatggacaggaaaggttaatacgaaactcggaatatttctcagagtgtctttagtagaactgcaaacggaaatgcccttaacgctgaggcaacaacacaggaaatcaaacaccagcatttgcatgtcaataacccttcaagttccgtcgcccgcctgcgtgtgtgccaggccacactgtgcaccgatgcgcagcttggacaacaccatgcctaggtaatgtcaggtagactgaccttcagagttaatttttggtttgagcagcaagtccccttaggcttactgtactcttgcctgatgggctttgtgtgtgttgagagtttta

SEQ ID NO: 140 - DNA, 453 bp, Homo sapiens
atggcttacttcatttatttatgtatgcttcacagctgcagcattcatacatgaacattcaaaactttataaaagattaaaatggttatatatacaaaatttcttttttttttttttttgcatgtgttttaacaatcccccaccctccagagccctaggtctatatccgtatgaaatgcattgatcggtaaccttatgagttagtgttatgaaagccattaaaaagtagacctggttgagttaattattagcactttgacccctaaaaaatgttcctggttacagaaaagtcctccattcaggcctttcttgtaagtgaagaaaaaggaatgcagcaaagaagagttcgacattggagtccttagttccatcaggatcccattcgcagcctttagcatcatgtagaagcaaactgcacctatggctgagataggtgcaatgacctacaagatt

SEQ ID NO: 141 - DNA, 488 bp, Homo sapiens
  misc_feature (257)..(257): n can be a, c, g or t
gatagtctcttcattctattagacaagcacgtatcgaacacttgcttcgacaaggctctttagttaacaatttagcagctactgtttgtgttaaacacacttttcaccaaataggttctgaggcaaacgagagcaatgactatttaaagaaaggctttcccagcatcacttacacatcccaaaactaaaaagatcaactcttccaactgagaaaagactcctggctttgaatggaaacttacagcagagagtcacanggccacggcaacaacaacgacaacaacaaacatttggaatattacttcccaactcaccgttttaataatacatcttattatttttctagtagagaaactacaaatcagcctcttcaacatttatatacagtttaataagcctcttgcaagttacttgttctctcacctgaggtatttttttcctccccaccttggccctgttctcccttcctcttctccctttgcaagagg

SEQ ID NO: 142 - DNA, 394 bp, Homo sapiens
aggcttctatactattgtctgccctaggctgtagggaatgctggttagtttgctgaacagacactgtgttcagcagggtttgtggtatctcaaatcccaggtctcagccaaagctttgcagttcaccctgactccagggaacagggcctcctttcgaggtgaggcacttgggttcttgcccttgcttcttcccagtgagaactgtttcctcctacttctacaagcattgcactgccagctgagagcactgactcaggcggggcaccctcaccaagtaagcagggggcattcagcatgccctctggttctgacccagagagaggggactgaaaataaaccctcttttgctctgtggctggcccactggctcaacatgagcgcttggcttggctgt

SEQ ID NO: 143 - DNA, 405 bp, Homo sapiens
  misc_feature (3)..(3): n can be a, c, g or t
  misc_feature (27)..(27): n can be a, c, g or t
  misc_feature (197)..(197): n can be a, c, g or t
  misc_feature (240)..(240): n can be a, c, g or t
  misc_feature (277)..(277): n can be a, c, g or t
  misc_feature (346)..(346): n can be a, c, g or t
tanatatgtttaaattttaatactcangaaaacaaacctaagttaaaattggatacaaatactgctggcataagaaaatatacacaaatttggattcaaatggggttattatgtgaacctggatgtaagactacatcctaacaacctgttgttgaagccttttaataaagtaacagattttaaatcagatagatatnaaaagactgaagaaaaacagtaacttttccttaagttctcttnatccataaagaatgacaaactccatatggacagtaanagttagaggtcatccaatttaccaaggcattttgaacacatgaaccttaaatacctactttaagcccanacaaggtaaaaattaatccggcatttcattgtgctccggaagtttaattttacatatca

SEQ ID NO: 144 - DNA, 294 bp, Homo sapiens
  misc_feature (200)..(200): n can be a, c, g or t
  misc_feature (231)..(231): n can be a, c, g or t
  misc_feature (239)..(239): n can be a, c, g or t
  misc_feature (244)..(244): n can be a, c, g or t
  misc_feature (268)..(268): n can be a, c, g or t
  misc_feature (274)..(274): n can be a, c, g or t
  misc_feature (281)..(281): n can be a, c, g or t
  misc_feature (288)..(288): n can be a, c, g or t
acacatggtgttagaaaatgaattttggcaccgtgattaagaatttcttttcaagtttaacctttacattaaaaacagtagctacaataaggatatttcaaccttacttagagaagtgataaaacatcaagtcaacaagtatttttgttggagaatttttttataagcgggatagagggaagttaacatagacactcagnagaataaaatggaaattatgccaggaagatnaaaaagcnaatanccctccccccaaagaaagaattanggagcngtgacanagggcanaaccgg

SEQ ID NO: 145 - DNA, 430 bp, Homo sapiens
  misc_feature (299)..(299): n can be a, c, g or t
  misc_feature (327)..(327): n can be a, c, g or t
  misc_feature (372)..(372): n can be a, c, g or t
  misc_feature (399)..(399): n can be a, c, g or t
  misc_feature (407)..(407): n can be a, c, g or t
  misc_feature (418)..(418): n can be a, c, g or t
ttttttttattatacaattctgtatttagcgactcgtttacagaacgtgttcctttttttaaaattttaaacaaagttcatcaatctctcatagaaacggtttgtgtatgtgtgtgtgtgttttttaaccgttataggacgtgaacctgacaaagttgttcacgggtccgctagctttaagtacaacagggatttccgtgttcaaaagactatactaagtgcttaatcaaatcccgtcacacttaaaggccaaatttaggttctctagggaatcgggagtctgcggtataagcctgggnttttcaacgttgtgttggggtttcaacnggtaaaaagtgggtgtgttcccccacgggttgtctttaatttgcnacagggtggttgggtggcctaaaaggngttttcantttggttcccngattttggttta

SEQ ID NO: 146 - DNA, 545 bp, Homo sapiens
  misc_feature (367)..(367): n can be a, c, g or t
  misc_feature (419)..(419): n can be a, c, g or t
  misc_feature (442)..(442): n can be a, c, g or t
  misc_feature (489)..(489): n can be a, c, g or t
  misc_feature (512)..(512): n can be a, c, g or t
  misc_feature (538)..(538): n can be a, c, g or t
gtgttgcaaagcctttaattagaatgtttgtattttttacatcatgcataacttcacatttgtgattaattagtaattatttcaatacttgtaagctcatctgcctcagatttaatcataatacatgaattaaattaatcaaattaaggaacagcaatttagaaagaaacacactttaagaaatcaaaattctcaattcaggcagtctgtttctatcatttggtattctactcctttaaaaatttcatattgcccaacaaaaaatggttatttttactgtttttggagatgactgaacagatgaaggcatcagatgccttcatcagctgggtattttgcctaagatctatttaagataacattttcntatattttttacttaatattggggcataatcgtatcattcaagattaagtcnggggtatttccttgataagaacnggaatgtggccgggcgcagtggctcacgcctgtaatcccagcacttngggaggccgaggtgggtggatcncaaggtcaggagatcgggaccatccnggctaac

SEQ ID NO: 147 - DNA, 274 bp, Homo sapiens
  misc_feature (19)..(19): n can be a, c, g or t
  misc_feature (36)..(36): n can be a, c, g or t
  misc_feature (43)..(43): n can be a, c, g or t
  misc_feature (54)..(54): n can be a, c, g or t
  misc_feature (117)..(117): n can be a, c, g or t
  misc_feature (134)..(134): n can be a, c, g or t
  misc_feature (186)..(186): n can be a, c, g or t
  misc_feature (196)..(196): n can be a, c, g or t
  misc_feature (207)..(207): n can be a, c, g or t
  misc_feature (212)..(212): n can be a, c, g or t
  misc_feature (239)..(239): n can be a, c, g or t
gggggtccacatagacagntggacagcagcaagccnatggggnccccagagganggctctgtgaagccaggatgcctgggcattccctggcaagaccaccgcagatgggcagcagantctgacctaagaagctngacttttgggcagtctgcaagccatggctcccggcaccggtccccccccagnagtgtgtccngagtactctantcgcncctcccggtgatccatgaactctgacncctccccagtaaaggcttctgtagagagcatgctg

SEQ ID NO: 148 - DNA, 474 bp, Homo sapiens
  misc_feature (265)..(265): n can be a, c, g or t
  misc_feature (289)..(289): n can be a, c, g or t
  misc_feature (371)..(371): n can be a, c, g or t
  misc_feature (383)..(383): n can be a, c, g or t
  misc_feature (414)..(414): n can be a, c, g or t
  misc_feature (449)..(449): n can be a, c, g or t
  misc_feature (474)..(474): n can be a, c, g or t
aatttaagcaatatgagtgtgaaaataatacagaaacagcctgcagagtcacgcaacttaccaaattcacactagcatgagtgcacattttcccttctgtgtatcaccttctgctcagtttacccaaagcagtttataaagtttatgaccattttggaagactggctgataacatttattgacttgggctttgaggaaattattttcaagagaaattaaataacgactcatagtaaacaaatacaaaacaaaaggcttttttttntttagtttgtttcacagtatctanaatgggcagaggatttcagggaaagtctaatcacacttgaccatgagtgttgagttgcttttccttcctctgagggccaagngttacttatatnccaaggaccgtggaggactctttttggaccngttggggtatggtcctgtggaccgggtccgggggnattggacccccggggttgttgggtn

SEQ ID NO: 149 - DNA, 407 bp, Homo sapiens
ctctcaaagcaaatagttccataaaacactaggtcaaagggcctcagtgtgtgtgtactgagtttgaagggccaagcaataatccataagagtgacctattagcagtatatttgcagaactaaaccaaaatctgtacaggatattatcaaagccttaggaacaacagaacatacatattttatgaagtggttggagaaccatctcctctttagtagttaacgtactgatgagtgtccccattttcataagcaaggacatactaacactaagcagttgaaaggcctgtctcagaagcatcctgccccaggtagctgatcacggtggccccataccacgacacagcttttcttttggttggtcttgctgagtgccttctctagatttgggctgtcattcaagcctcttc

SEQ ID NO: 150 - DNA, 453 bp, Homo sapiens
tttttgacgtgagaatcaatacaaaatatttattttttttcaaaccacagaattcttaaccccagagccacacaataaagttctcagaattgtaagccattaacatttttctaaacaatgcagtccagagatgaagataatttccaaccagcagggatgcaatatatagtaggttcccctatgaatgaagctcaaattagcatttccttaattctcccacagccactccatcaacagaagcagaaacagtacacatattcatgccactcggctctgaaaagaggttcaaggtgggtcaaggtgggtcttggccagtggaggaaggaaggtgtccaggactttagttaatcaacagtggggacagagaggaatgatttcccttggaaaacaacagggttcctttctcatattcttgtggccagaaactggggtgaacttcagtggggtaattga

SEQ ID NO: 151 - DNA, 439 bp, Homo sapiens
tttttttgcgttttcatactctttattgccaacggtttaaaatggtcaacataaaaaaaaagacattttgataataaatactgctctttgggctgtaataaataaaaagtttattaacaaggaatgcacttttccagccacaagtatcttcaaaaattaatgaaaaaaaattatatatggccatagttcacagttacgcagccaaaagctgctccaattacagcctttaaacaacatgggagcttcctcccttctccctccccttcaggaagtatattcacagttccaaagtcctctggctgaaatgctctcaacagagagaatttaagaatcaatgcacctttctgcaaaattgtctgaaaaaccttttaaaacaggtatctcaaggaaaactgcattctggttcactcttggattgtccaaagtcaagaactgtatg

SEQ ID NO: 152 - DNA, 602 bp, Homo sapiens
  misc_feature (445)..(445): n can be a, c, g or t
  misc_feature (499)..(499): n can be a, c, g or t
  misc_feature (513)..(513): n can be a, c, g or t
  misc_feature (537)..(537): n can be a, c, g or t
  misc_feature (564)..(564): n can be a, c, g or t
  misc_feature (572)..(572): n can be a, c, g or t
tcagagaaaagaggtttattgggcttcatcgagggtgcagatgcctccgtgtggggctctggtcggcagctggctttcagagcctttccctgccttctggggccctgtgatccctcatgcctacttctttctctcttggtcagccttgtgcgcatgcctctcactcttcatctcttgggcctgtctctgtttctccttggatgttcttctattattcccctctctccatcctccataaataaataatttaatttttttgccttcataaatagtcccctccctgcctctagtcatcccccaagctcctccatgtgcctgctcttcctctgtgtgtggatctaaggccccacctagctggtgggacagaccaacagctttggggctgggaattccctaggcaaggcttgaaatcctcagccagacagacatcaagggaatggttcangggagggtgtgggtcccctgggaatggcctaagaaatccctccttgaaagctcngggtgaatttgaanaaggaagacttgaagctggttggnaagggccaaaggagaaggtgggtgccncgtgccgnaatttttgggctcgaagggcaaaattcccc

SEQ ID NO: 153 - DNA, 475 bp, Homo sapiens
ctagttcttcctcagtgagagggaggtactgttctaccaacagctctgatttggtgagtgcattttctacgccactgctcacgagctgcatcatccgactccccaagactgtgttaatgctgccactgaccacagacttggtcttctccacactgccagtcactgcccctttggtcttgtccatcacccctgtgatcgtgctggccacagaatccttggccccagtcacagtagtcgtcacagcatcttttgccccagtcacagcgcctttggagttggcaacaatctgagttgatggctgattcagaataggcagtctctcctcaatcctgtctagccccttacaggcataggtattggcaactgcaatttgcggctctagcttctggatgatgggcagagcactggtcatggccacggaagtgatggtcttcaaacggttctctgccatctcacacacagacttcaggtaggg

SEQ ID NO: 154 - DNA, 190 bp, Homo sapiens
gccatatagcctttttcctaattaagagaaccacatcctattcctaacttattactattaatgacaacacaggcatcaaacttcaaggtgacttgtttgggcaccctttttcttttgttttggctaacactttactcatatcgtttatgagcccccaccaggtttcagtccttaatcttaaaaactgtgg

SEQ ID NO: 155 - DNA, 431 bp, Homo sapiens
ggtgactggactttccagatcctggtgatgctggaaatgactccccagcgtggagatgtctacacctgccacgtggagcaccccagcctccagagccccatcaccgtggagtggcgggctcagtctgaatctgcccagagcaagatgctgagtggcgttggaggcttcgtgctggggctgatcttccttgggctgggccttatcatccgtcaaaggagtcagaaagggcttctgcactgactcctgagactattttaactaggattggttatcactcttctgtgatgcctgcttgtgcctgcccagaattcccagctgcctgtgtcagcttgtccccctgagatcaaagtcctacagtggctgtcacgcagccacaggtcatctcctttcatccccaccccaaggcgctggctgtgactctgcttcctgca

SEQ ID NO: 156 - DNA, 406 bp, Homo sapiens
  misc_feature (14)..(14): n can be a, c, g or t
  misc_feature (361)..(361): n can be a, c, g or t
gtgctttatgtttnttttaggagagtattggggagcggtctggtctctcagggatggcactctgtgggtctgtatcgcggtaggagttggaatgaggtgcagggtgggcttcaggaatggctggatccaggtatcatgttgctgactgtcatgattcgggctcatttgtaatacggcctctgtgtgttgaggtcgctgtagacatccgacctctgaccctgggagctcctgataaggcgactcggtctcagtgatacgctgtttccgggtcgctgcctccgcacccctcgcccccgagggaccagccggcccagggaagtacacggccaggggcaatgagcactgtcagcaccagggtctnccatcacgatcccttgccagcacgcccgggctcaccgtaggagca

SEQ ID NO: 157 - DNA, 331 bp, Homo sapiens
aatcacctgcagatggataagagggaatgagaggagtagaatgggacactaagtggttctcatcctaagcttgcagggccaagtgctgccgggtgttggagaagtagttttgttctgatgtagatggataatacaggatctagtgggagatggcattggactgggaagggacatatgtgaccccaataattctggagatgacactcctggtcatttacttctctgcccatgggaggtgagaggtcagctgacatccttcccattccaggtgggtcaccaggcccaaatcaagaagtagctaccaaactccaagaggcagagtccctgtccc

SEQ ID NO: 158 - DNA, 625 bp, Homo sapiens
  misc_feature (315)..(315): n can be a, c, g or t
  misc_feature (532)..(532): n can be a, c, g or t
  misc_feature (585)..(585): n can be a, c, g or t
  misc_feature (607)..(607): n can be a, c, g or t
  misc_feature (613)..(613): n can be a, c, g or t
tttttttttgttgcaggttgttttattaaaaccaggtgagtcactgccatacctgaggaggcacacacaagttccagatagtcaaatgcttccccagctggcccgcccagcccagatctcctcctcattgcaaagggacattctgctgtcttcaaggggccagtgattaatcagacaattgctactgtcaggtgtagttaatggcttggatttggggttacagccagtttggaggttggaagaagttcggttgggatttagaagaaaggacaattaattcagatccaaaccatgcagaacacagtgagccaaggnccactcccggttcccagggtgatgacatcccacagggaggcgcatcgtgggcatgcaaagccaacttcaacaccccagccccagcccctcagctcctcctgcccacctctactaaacaaagcagacacttcagaagcaaactctatatggctacacgagatcagaccccgctctctcttgaacccggggcccagatgggtgggggtgggagcggcangggctagcctggaagcccagctcctgtagttggaggccatgttcttccggaanagctccagggcttgttcatggnccctgntcgtgcgaattc

SEQ ID NO: 159 - DNA, 357 bp, Homo sapiens
  misc_feature (9)..(9): n can be a, c, g or t
  misc_feature (12)..(13): n can be a, c, g or t
  misc_feature (15)..(15): n can be a, c, g or t
  misc_feature (256)..(256): n can be a, c, g or t
  misc_feature (262)..(262): n can be a, c, g or t
  misc_feature (332)..(332): n can be a, c, g or t
tctgaattnttnntncttttaatatggtttacattctatctccagagaaaacacacttaacagaagacagaaaacatttaacaaatccaaagcaattaaaaatagccacaaaaaaagagaataacctagactgacagctcacagagcaaggaggtggcagagacctgcccagggtgagcttggctgttgcccccagctcaatcttcctcctctcctctctctgtcccttcacctctgatcagtcccagcctgattnccgttncctgatgcctcaccttcttgctgccagaaagcctctagggggactaggggggccttaagattccagagcnggggcttgggggccttaagggggaa

SEQ ID NO: 160 - DNA, 381 bp, Homo sapiens
gtaaagaaaaatcaagtttattgtggcatcaaaatattgacagagctgttatcagtcaagagcagtcttcttgttgctaaaacgaagaggcagcctgagcctggctccatccaaccacctcttctaatgctctttaactggcagtgcttcctataaatgacaccaagcaatagagatgattattgtttccactgaatagagtaagttccttgattggtttaacatatatagactgcctgagagaataaaaacatcaccatacaataggttaacggtaaatcaaggtcttcgtagttgtgatgggagaaaagggttggctgctggaaacagtatggtgccctggaggctgcgtacgtacacaccctaagaattcacatcacc

SEQ ID NO: 161 - DNA, 488 bp, Homo sapiens
  misc_feature (455)..(455): n can be a, c, g or t
  misc_feature (464)..(464): n can be a, c, g or t
  misc_feature (480)..(480): n can be a, c, g or t
  misc_feature (486)..(486): n can be a, c, g or t
tttttttttgtgtgcaagtgtttatttggaatcccttctattttattagaaacagaaacagtaatttcaccagtaggaattgcgtgtgctctcaatacaagtaagtttgccactccttcaattgttgtccattgcagacactttggattcaaggttaagaatccaaatgagaaataagaaatatccggtccctgatgattcgtttaagtcctgttcaactcgatggaaagcttccacccgaaggaaggagttactgttcctcctgggctgggctttgtgtttctttcagtgctctaaaggaactttgtatttggggcagctgtgctctggtcatgtcagggctggctgggacagggagtttggatggcttacgggcggccgctggaccgggggctggctttttacttgaaggcttcactgggggtgttccattcaattcacaaagtggggcgttntgcaggccngtggaagggttttgcngggggntt

SEQ ID NO: 162 - DNA, 478 bp, Homo sapiens
  misc_feature (306)..(306): n can be a, c, g or t
gtattgatttcatgatttatttatatatctccccaccccttccaatacttgaaaaaaaaaaaaaaagaatggcagtaccagaaggcattggttaagtgtcccaggaaccacacaagcagtgactcctaaagaagttcagaggaaggagagaacccatggggagggggtgcagtgggggtgggtcagggtgggctccctggaggagaagtccatctggtggggagaatggtctaggcaaggatgcagactggccagtaaggtgggtccatgcaggaagctgagggaggtggaaggcccgtgggctcngagcgcatctgcccgccctagtccggggaagagcaggaagccggagaagacgctgtcagagccctgggatgcccaccatgtccgtagtaagtcatttgacagccagccacacctcctcgcccacctgcaacctcagcagcacaccgcccgagttgacctgattggttttgga

SEQ ID NO: 163 - DNA, 344 bp, Homo sapiens
aactcaggatcatgtttaattatgtaaaaaagctctgaagtcaggtaatgtttttcatgtgcttctcttgagcagtctgaggaaagaatagaaacagaaaccccttgggacctgagtagacgcagctggccgtgcacaggcagaggctctgggtcagtgcaggaagcagagtcacagccagcgccttggggtggggatgaaaggagatgacctggtggctgcgtgacagccactgtaggactttgatctcagggggacaagctgacacaggcagctgggaattctgggcaggcacaagcaggcatcacagaagagtgataaccaatcctagttaaaatagtctc

SEQ ID NO: 164 - DNA, 272 bp, Homo sapiens
ccacgcgtccgggatctccaacatggcagccttttccttagaacaccaaagattgtctctggcaaagactataatgtaactgcaaactccaagctggtcattatcacggctggggcacgtcagcaagagggagaaagccgtcttaatttggtccagcgtaacgtgaacatctttaaattcatcattcctaatgttgtaaaatacagcccgaactgccagttgcttattgtttcaaatcccgtggaaatcttgacctaagtgggcttgggaag

SEQ ID NO: 165 - DNA, 469 bp, Homo sapiens
  misc_feature (29)..(29): n can be a, c, g or t
  misc_feature (89)..(89): n can be a, c, g or t
  misc_feature (137)..(137): n can be a, c, g or t
  misc_feature (140)..(140): n can be a, c, g or t
  misc_feature (143)..(143): n can be a, c, g or t
  misc_feature (212)..(212): n can be a, c, g or t
  misc_feature (279)..(279): n can be a, c, g or t
  misc_feature (370)..(370): n can be a, c, g or t
  misc_feature (372)..(372): n can be a, c, g or t
  misc_feature (468)..(468): n can be a, c, g or t
gcagatctgaggacatctctgtgccaggncagaaaccgcccacctgcagttccttctccgggatggacgtggggcccagctccctgccncaccttgggctgaagctgctgctgctcctgctgctgctgcccctcagngcnaangccaacacaggctgctacgggatcccagggatgcccggcctgcctggggaccagggaaggatgggtacnacggactgccggggcccaagggggagccaggaatcccagccattcccgggatccgaggacccaaagngcagaagggagaacccggcttaccccggccatcctgggaaaaatggccccatgggaccccctgggattgccaggggttgcccggccccatngnattccctggaagagccaggttgaggagggcagatacaagcagaaattccagtcagtgttcacggttaattcggcagacccaccagccccctttaant

SEQ ID NO: 166 - DNA, 630 bp, Homo sapiens
  misc_feature (574)..(574): n can be a, c, g or t
  misc_feature (581)..(581): n can be a, c, g or t
  misc_feature (593)..(593): n can be a, c, g or t
  misc_feature (600)..(600): n can be a, c, g or t
  misc_feature (614)..(614): n can be a, c, g or t
  misc_feature (629)..(629): n can be a, c, g or t
tgtgattttaaaaaacagaaaactttatttgaacaagaaaaagttaaaaatgttacacttcgaaaaaattttaaactcgttaatcatttttaattgacaaataactgcatttacagggtactacatgactttttgatacatgtgattaaaccaggctaattaacatatccatcacttcactttttttgtggtatgaatatttaaaatctctcttagcaatttccttttttttttttttttttgggacagagtcttgctctgtcacttagactggagtgcattggtgctgtctccactcactgcaacctccgcctctgggattcaagcaattctcctgcctcagcctcccaaatagctgggactacaggcatgcactaccatgcccagataatttttgtatttttagtagagacaggggtttcccgagacagggtttcaccatgttggccaggctgatcttgaactcctgacctcaggtgatccacccaccttggcctcccaaagtgctgggaattacaggcgtgaaccaccatgcccagtgcaattttcaaataggcaatacagttgggccccnggtatcnggggggttccanatcctcnggatcattcaaccngtggtttcagaagang

SEQ ID NO: 167 - DNA, 270 bp, Homo sapiens
  misc_feature (82)..(82): n can be a, c, g or t
  misc_feature (86)..(86): n can be a, c, g or t
  misc_feature (137)..(137): n can be a, c, g or t
  misc_feature (157)..(157): n can be a, c, g or t
  misc_feature (167)..(167): n can be a, c, g or t
  misc_feature (186)..(186): n can be a, c, g or t
  misc_feature (197)..(197): n can be a, c, g or t
  misc_feature (236)..(236): n can be a, c, g or t
  misc_feature (245)..(245): n can be a, c, g or t
catcaaaatagtttattgtgttcagaaaaatcacagtttgaggaaaccttaaacaataagtacacaagagatgccccatggnattnccatagcagagacagactcctgtatgttttattccagaggcattgcatggngataataaaatgataggaantagaggaaantagatacaggaaaaggcantagacagggangccagctagatgttagagtacggagcattcgaggaggcntaaccacanttgggggtggctttagggctgggaa

SEQ ID NO: 168 - DNA, 482 bp, Homo sapiens
  misc_feature (24)..(24): n can be a, c, g or t
  misc_feature (146)..(146): n can be a, c, g or t
  misc_feature (341)..(341): n can be a, c, g or t
  misc_feature (381)..(381): n can be a, c, g or t
  misc_feature (426)..(426): n can be a, c, g or t
  misc_feature (447)..(447): n can be a, c, g or t
tctaatcacacttgaccatgagtnttgagttgcttttccttcctctgaggccaagagttacttatatccaagaccgtgaagaactctttttgacctgttggatatgatcttgtgactgggtcgaggaaaatgaactcccagggttnttggagtagagctgtttccaccaaaagacagaactgtatgcagctaataagagctccagcacagtgaagatgagcatcaccactaggacacctgttaaactgacactggtcaggagacaatctttgatttcatatattgggataatagtactccgattaagggcaatgagggatagataatccatttctgagccnccaatgttgagaggcagtccctcaggggctaccctgctgntcagcaagggagggaggagggcctgcttcctgcagttaaccaggncttcactggcattttgagggncaagctgctccgggtcaaggggctttagtttgttg

SEQ ID NO: 169 - DNA, 319 bp, Homo sapiens
tttgtctcttcccacactttatttttcaggaaggagagaaaaagaatgtcatgtctaacatatagtagatggttttagttacaaacagaggtgaaatccttactgatcaagttgccatgaaaaaccagggacctcatctttggaaagtcttaatatatgatttcaaatatgtgcagcgactgtacaaaaatttggaaatatacacaagagtgtcactcagcatcatgcctggtatataaaaagcactaactaaatgtccatggaataaatgaatatatgaatatcattccttcactcagccaagcaaagtaggttgtca

SEQ ID NO: 170 - DNA, 439 bp, Homo sapiens
  misc_feature (335)..(335): n can be a, c, g or t
  misc_feature (383)..(383): n can be a, c, g or t
  misc_feature (406)..(406): n can be a, c, g or t
  misc_feature (421)..(421): n can be a, c, g or t
  misc_feature (438)..(438): n can be a, c, g or t
ttttttttctcatcgtacaattttatttttcttttaaggagataaggaaggggaaaaagtagttgatttcctgtgtttcttatttagaaaaaattaaattatactgcatttttctagtattctgttagaaatttactttattaaaccttgataacttcagctataaacctaaaatattcttcttatactgatagaccaaacaaaagggctaaaaacaaatctatcatctaatttagattatatgtaagttagtaagtctcttcaaaataaagaaaggtagttttaggacagagatttttatatagattgaaagttatcttcccctggaagaaaanggtgaatcccgaggaatctagccggcactttcaaaaatgtgtgcaagnggtttatttgggaatccccttcnattttattagaaacnggaacccgtaattttcnc

SEQ ID NO: 171 - DNA, 606 bp, Homo sapiens
agtgacagtgaatcagataaagcgatcacaccccaagcacaggaggagttacagaaacaagagagagaatctgcaaagtcagaacttacagaatcttaaaacatcatgcagttaaactcattgtctgtttggaagaccagaatgtgaagacaagtagtagaagataatgaatgctgctgctgagactgaagaccagtatttcagaactttgagaattggagagcaggcacatcaactgatctcatttctagagagcccctgacaatcctgaggcttcatcaggagctagagccatttaacatttcctctttccaagaccaacctacaattttcccttgataaccatataaattctgatttaaggtcctaaattcttaacctggaactggagttggcaatacctagttctgcttctgaaactggagtatcattctttacatatttatatgtatgttttaagtagtcctcctgtatctattgtatatttttttcttaatgtttaaggaaatgtgccggatactacatgccttttgtatcccacagtatatgatggggcatgtgcatagtgcaggcttggggagctttaagctcagttatataacccac

SEQ ID NO: 172 - DNA, 237 bp, Homo sapiens
tttttttttttgaaatttcgaatggcaaaattactaaggaattttaaagccatcaatttacaaaaggctattaggggtcttaaaaagacaaagagtatacaataaaacaataagcaattacagattgttttaggttgaacaatttttgtacagttatatctatagtacattactaatttacttagcaaactttatcctgagattgcaaatttaaaaaaatgaagaatccaaactata

SEQ ID NO: 173 - DNA, 481 bp, Homo sapiens
agattccagaagatgcagtatttttcctaaggcaggagaaaaccctagttcatagacagccaggataaaaaccctggaagaccatgagccaaggtgaacgaagaggaattttctaaatcttggggacagagaattatgttacatcaaggcagccatgcaataaaatggaaggctatgaaagcaagcaaggcacaagaaaacccccattccacagagagacacaagtgttctatttggtgaagagtttggtgcacagacagactgcatcctgtgaagaggtggcccttgtcaaggctactgcgcacagcaggatctttgcatctttaggatgtgtcactagctcatcgaaactatttctgtaactctctgcaagagccaatttaagctggcgtctcagttccctctgcactcaaaagagaccaatttccaattcctcctcagagtccgtgagaccagatgctacagcaaatgttccagagaa

SEQ ID NO: 174 - DNA, 308 bp, Homo sapiens
  misc_feature (275)..(275): n can be a, c, g or t
  misc_feature (286)..(286): n can be a, c, g or t
ttaaaatgaaatatattttttttaattagcagattcagtttcttacccacataataaaaacccgcacttgcaagctgctcaggattaactagaacactagagggccagttaaagaatgttttaaagcgggctgcatgtgtctgcatgctcagattagaaactgtgtatcttgaagtgtcttgaagctgattttctataaatgggcatttgggaaaatgtctcaggtgttctgacatagcattatccttcggttcccaattgctcaattttccacnacaggcaaagncagccactctgtctccaggtcc

SEQ ID NO: 175 - DNA, 421 bp, Homo sapiens
ttgttgggttttgaattatttgtggtgctaagaagaagggaacatggttggaggcccagtgagagaaacagtgctttgaatcaaagagcagaatgatagaaactgacttcagagcaacttcttggcagcagtatccaatttggaagttgaaggtctgtcctggagccagatgctaacgaaacacagcaaatgcttttcctaaggcacaatagtcttttcagtgagctcaggaaccctgtttatgcagatcctcgttgaactttcttgctcctcctgtgcatgaagatgcccactccacagatgatgagccccagcacgaagcccccagctcccgtcaatgtcttactccgggcagaatcagactgtgccttccactccacggtgacaggactatccaggctggtgtgctcacttggccagg

SEQ ID NO: 176 - DNA, 306 bp, Homo sapiens
acttgagaagtcaaacagttttattacagaactatgtgtatatattttgggtttaaaacttgccaatagctgtttgaaaggatagctcataatttattcaaatagatattttattaatcaaatgtttttggtttatcaacataaccaaatgtataaaaaatgtttttaaatacaagacataactataaagtcatgaggctgattgaccttttaaactaacataataaaatctatatggtcaaaatgagtggtgatgctttaaggtaatgattatgcgtcccatctaaggatgctgcaatggcctag

SEQ ID NO: 177 - DNA, 543 bp, Homo sapiens
  misc_feature (270)..(270): n can be a, c, g or t
  misc_feature (449)..(449): n can be a, c, g or t
  misc_feature (457)..(457): n can be a, c, g or t
  misc_feature (525)..(525): n can be a, c, g or t
  misc_feature (538)..(538): n can be a, c, g or t
ttttttttttacaattgagaaaacatatttaataaatcattgtcaatttttataatgtttcaagcccattctttgttgatagcctccacatttatatggttaagtcattgttgctgtgtttcttacctatgacattatttttatatcccttcatttgtggatcttaagatgttgcagaaggttcattcctgtaccccaatacagattcacttcctttagctgccttttctagcaccaatatgctttaaaaaaaaatgcgcaaacaacaangcagtgacagcggccaattcctcgaatgtccagattaataactgtagcatgctaaagaaaggtgtgtgtaaatagctcggagatgggtatatggtccagagtccagcataaaattatttcctttctgagcattccctccattgcccctaacccgaatacatgcattagaatggtagcanaacccttncggaaacctctcttagccaactgcaaacttatctgttgccacaagtgcaaagggggtaggatgtgaanccagtatattccncaaag

SEQ ID NO: 178 - DNA, 435 bp, Homo sapiens
ttttttttttcctggaacctgtcacaagctttattgtcccgagcacagactcgccacacttcaacaattccactgtggggaggggaggggtgaatgaaggacctggggaggggacatggctgagccacacccgggcggccacacggggcgggctgagaggcccacggaggcagaagctcccaaggaaaccgcttcttggacacccgtcaccaggagcccacctccgggggctcagctcctcccggcaccctcctagatggacctctggctgttagtagactaatcggtgcccctaccgatggggcagagctgcctgattttgctagaaagagctgtatttgaccctggggtttaggccactaaagcattcgtttcttagacggctgttaatagaactgcatgcgagagttaaccgaaagccaacagggatttggg

SEQ ID NO: 179 - DNA, 387 bp, Homo sapiens
  misc_feature (74)..(74): n can be a, c, g or t
  misc_feature (337)..(337): n can be a, c, g or t
  misc_feature (384)..(384): n can be a, c, g or t
gattcaacaatacatttttaatatagctttaaaaaggcaaacgaattttaagatcaccaggggcaaatgcaganatagagacattcactggatccagttacgtgtgtaaatgccctttaccaagtcaatactattaaagagactagtggttgtggcagaaattgtttctgcttataagggaggcaagccaggttctagtgtcctcagcaaaggcacaaactcatagcataatgccaggccagtcatttaacttcccagagtctcattcccttcgctgacaaaataggaagattgaatcagtttgatttctcatggattaactattttcatatccagntgaattttcagcttatcagcttactcaattggccaactggcttttcntcc

SEQ ID NO: 180 - DNA, 462 bp, Homo sapiens
tttttcaagaaactcatggcttttaatcctggcaggacaaggaaaaccccgtcaaagatttgcataaattttgctgctctcctgctgggggggtgggggggggggcagttcgtcacatttaataaaattctctccctcccttctcccgactgcattatctcatatttatttatttgagacagtctggctctgtcgcccaggctggagtgcagtggcgcgatcttggctcagtggcgcgatgacggctcactgcaacctccacctcctgggttcaagcagttctgcctcagcctcccaagtagctgggattacaggccagctgggattacgccgccacacctggctaattgtatttttagtagagacagggtttcaccatgttggccaggctggtctcaaactcctgacctccagtgatccacctgcctcagcctcccaaagtgctgggattacaggcatgag

SEQ ID NO: 181 - DNA, 597 bp, Homo sapiens
  misc_feature (439)..(439): n can be a, c, g or t
  misc_feature (511)..(511): n can be a, c, g or t
  misc_feature (523)..(523): n can be a, c, g or t
  misc_feature (540)..(540): n can be a, c, g or t
  misc_feature (578)..(578): n can be a, c, g or t
ttttaaggttctcatgtcttccatttattttgtctctcaaattttaggaatcttctcctttaattaacccatcaacctctcatggcaagaatttgaaaaagtaaatttatactcagattctaattttaatagggaagtaagaagttacagctcagtgcacataaagttgagacagagatggagacatctcagcctcacctctatggagcaggaatgattaattattggagagggaacacaggtcagcatgagggaagagggtcatggtggacatgggggtgggttggtctccccacctcctcatattatgcctacaggaacacaggcacattcaggtgcctttgcagaaagagagtcagggtttttgaagtcacaaagggaaggcgtgaacaaatcttgcctctcagtcccacacaaggcagctgtctcacactttacnagccgtgagagacacatcagaaccctgcgcatggtcgctgcttgccctttcagaagtaagctcactctatcntgagttccttcntcccggcacatcacagnggaaacccagctccagtgactaaaagctcccagggganccaggcccgttaacgatgc

SEQ ID NO: 182 - DNA, 438 bp, Homo sapiens
ggatttcgcatttgagatgctttttataataaagttatgccaaaaatacagcaacaaatacagaaaaagtattaacaaacggagaagccccagatacacgtacagtaacaatacaaaaatgtgactggtcaaacagctcaagttcacatttaacactttcaattatttttaattacactatttctgttcaaaagaatgttttccttacatacaaccatgatcagtctttagtctcaatcgtaccaaaataaagctatatataagcactctgactaggtaaggtgtgaagtaccccgtgagttgctctgtggcttgagatgggacacatggtctcaaatgactcttatgcatgccttgccttaagaaagaaaagtaatgttgatggtttaaaaagtaagtactttttgaagcagcagatgaaatgtgtttactaccagc

SEQ ID NO: 183 - DNA, 369 bp, Homo sapiens
gggaatactgaagtatgtagtggtcttagggtattctcgggaaggtgacagtgaggggttcttcaaaggagaacagaggataaaaggctcaatgaaaggataatctccatattagtgctaccaaagtgtcattaatttctatttgttggaaactttactaaggaatgactgctttgaggtaatggataaggacagagcttgaagggtcagcaattcagtcagccactggagtagttttcacatgaagtgagaagaaaagctgagatggagtttgtagggcagctggagttcagatctctcctaagtccctcttctggttcagatattttggtcacctgtgtacagtatgttcacagggggtcccctggg

SEQ ID NO: 184 - DNA, 450 bp, Homo sapiens
gccatcatgcatcttatcaaatttaataacatgcacgccagtcagagcacatttgtgggcaaacctgggctatcagctgtcactttgatgcccaaggtttacatgtaaatagggaagctctgtgggggagaggaggagggcaggttgggggagcactgaactcagtccagcccatggccacttagtcatggactctcacagataggcaggatcttggggaggtgggtccatccttatctacattttacagatggggaaagccaaacttgtccaaggccaccatggcacaggtgccctggtgcatccctctcttcacatgcttctcactcaaatttctgtcctgggaaccaagaaaccttgaggatggaactgctcccatacttccttctgaaggagagggagagggcagggctctgtattgggtggcaagacacctaggtccaggccccc

SEQ ID NO: 185 - DNA, 436 bp, Homo sapiens
  misc_feature (425)..(425): n can be a, c, g or t
gattgagataataaactgttttatttattgaagagtaaaatagtacattaacaaaatcttatctgatagagagataataccagaagtcttcttactgtgattatcagctaagtgactggttgaaatcaggatataaatcactggatagtttttttctggaaagacttagaacacatcaataaggccctctaataaagaaattgaaatgagatcttgccctttggagaaagagaactgtgtaattcctgtagccagggcacttagtcaaagagaaacagagggttgtgacaatggtccagtgagcctggccccagaactcccttcaactaagtccccttgcttgactttgggggagaagactggggcattatttagaggctgggagcttaattcgaccatggggaagatgccaaaattcctatccnggggttccccc

SEQ ID NO: 186 - DNA, 421 bp, Homo sapiens
  misc_feature (8)..(8): n can be a, c, g or t
  misc_feature (136)..(136): n can be a, c, g or t
  misc_feature (138)..(138): n can be a, c, g or t
  misc_feature (259)..(259): n can be a, c, g or t
  misc_feature (287)..(287): n can be a, c, g or t
  misc_feature (332)..(332): n can be a, c, g or t
  misc_feature (403)..(403): n can be a, c, g or t
  misc_feature (411)..(411): n can be a, c, g or t
ccttggtngtcactttctatagagatgccccaaatataaaaatcaattcatttcagaaatcaaaaaaattttccaaacaaacccggagcctttgctttaggaagcaaactcaagtctgtgatgattattgtgcttnanggatgggtttctaattctgtcataaaaaatgatgaaacaaggtgatgtcagagggacttcaggtgacaccaaaataccccatccagggcctggaagcccctctgcctttgactctaagatngggcaggacccccgctctcagtgggatntgcccgcgaccctggcgctgggaggcagtgctgcagagaggagtngtgtccgcacggctgtcaccagacattcctcattcacccttccgtaccgcacagcccagcgtacttccttnccacaagncaaaagattg

SEQ ID NO: 187 - DNA, 425 bp, Homo sapiens
  misc_feature (183)..(183): n can be a, c, g or t
  misc_feature (210)..(210): n can be a, c, g or t
  misc_feature (264)..(264): n can be a, c, g or t
  misc_feature (273)..(273): n can be a, c, g or t
  misc_feature (278)..(278): n can be a, c, g or t
  misc_feature (284)..(284): n can be a, c, g or t
  misc_feature (290)..(290): n can be a, c, g or t
  misc_feature (343)..(343): n can be a, c, g or t
  misc_feature (351)..(351): n can be a, c, g or t
  misc_feature (382)..(382): n can be a, c, g or t
  misc_feature (412)..(412): n can be a, c, g or t
gtccatggcagttttattgggggttctcccttcccatattttagctggagttgggaatggggaagagaagaagggtgggacaagagagtgagactagaatataaatatccgtaaacagcatctgagcattagtctttaacagggaggaggaaccactggtgtatattaatttaggacacaggntcattataggggtagggccagctggtnttaatggcatgcaggcatatgtgatgccaaccatgagggctggaagaaccagangccaaagangattntgaccncatctnttctaaagctactgtgggtggtttctcatgcttcagagtctcgtaagtctccngggttccngggtgctcaggcccgtgtaaacaccatctgnttttctcctagccggttatagccgcccttncgcacttgggttt

SEQ ID NO: 188 - DNA, 602 bp, Homo sapiens
  misc_feature (53)..(53): n can be a, c, g or t
  misc_feature (540)..(540): n can be a, c, g or t
  misc_feature (575)..(575): n can be a, c, g or t
  misc_feature (578)..(578): n can be a, c, g or t
ttttttttctcttttcattttttattaaggcagtaacattctttcttcctggnggcggaggggggaaatcatctgaggctacagtaagttcaatctgaagtcaaaaccaaccaatttgtattcagaagcagcaaaaatactggttatgggctgggaggagccacatgttggctttctgagtccactgccaaggaacagatccagagcaatgcatttcaattgctttgaaaaatggctaagttccattacataccaccactaaagaagatacctcattgatggagcttttcaccatgatagagggcgtcttgcattggttcacaatggcctgttgctttttagccttcagttggtttagggggaaattgctcaacctatgagacctgctcaaattcatactgttctggttttgctttggaattctttgtccagtaaattagctcttcataacgcagttccaccatttcttatccagcatagattcattctgcccttgacagctggctaggtgtgtgtgtatgtgagtaagggtgcattgantggcacaattgtccccctggagttaggggtggcanaanctttatagtaccaaaaagtaacat

SEQ ID NO: 189 - DNA, 373 bp, Homo sapiens
ttggaaaatgttaaaatttattaataatagttaacatcacatagttaattaaactagttatgtattgtacataatgacaacatcttcactagactgagtgctcaaggatttgagatgattcgctattcatcacaccccgaagattgagatccactgtatttacacaaagcaaagccatgtcagcaagggactgtcaacctgattctgagaacataaacattcaaaatttattttccagtgttcctttttggaaaccaacaacacatctttaatacctacacacacacacatctctacctttaaaaaaaaaaaaaaaagtgtaacttcacagatagtacctaatcttcaagcttaaaatttaagttaaaattaa

SEQ ID NO: 190 - DNA, 391 bp, Homo sapiens
gaagagcccacatgtagccctgaggtttccttcccaggacagctgcagggtagagatcattttaagtgcttgtggagttgacatccctattgactctttcccagctgatatcagagacttagacccagcactccttggattagctctgcagagtgtcttggttgagagaataacctcatagtaccaacatgacatgtgacttggaaagagactagaggccacacttgataaatcatggggcacagatatgttcccacccaacaaatgtgataagtgattgtgcagccagagccagccttccttcaatcaaggtttccaggcagagcaaataccctagagattctctgtgatataggaaatttggatcaaggaagctaaaagaattacaggg

SEQ ID NO: 191 - DNA, 164 bp, Homo sapiens
  misc_feature (131)..(131): n can be a, c, g or t
  misc_feature (151)..(151): n can be a, c, g or t
  misc_feature (161)..(161): n can be a, c, g or t
aatagtaataacctttatttaaaatagatttactttaggaaagctcattttatatgagtttccaactaattattagagtcagaaacaaagaaaataaaatcagagaaaatcctctgtagaaaaaatacacnaagaacatttctacctgggnaaaaaccgtnaac

SEQ ID NO: 192 - DNA, 463 bp, Homo sapiens
ttttttttttttttttttttttttttctggaaggttctcatgtcttccatttattttgtctctcaaattttaggaatcttctcctttaattaactcatcaacctctcatggcaagaatttgagaaagtaaatttatactaaggttctaattttaatagggaaggaagaagttacagctcagtgcaccatgaagttgagacagagatggagacacctcagccccacctctctggaacaggaaagatgattggggagggagcacaggtcagcgtgggaagagggtcatggtggacatgggggtggggtggtctccccaccccctcacattatgcctacacgaacacagacacatgcaggtgcctttgcagaaacaaagtcagggttcttcaagtcacaaagggaagggcaggaacaactcttgcctctcagtcccacacaaggcagctgtctcaactttacaagc

SEQ ID NO: 193 - DNA, 269 bp, Homo sapiens
ggactcggaggaggacgcagactcggaggcggacggggagacgccgcgggtcacggcatggcggtgatggcggcggacgcgggcacatggacatgggcgccgaggccctgcccggccccgacgaggccgccgctgccgcagccttcgcagaggtgaccacagtgacagtggccaacgtgggggctgctgcagacaatgtcttcaccacgtctgtggcgaacgcggcatccatctcaggacatgttctgtctggtaggacggcccttcag

SEQ ID NO: 194 - DNA, 209 bp, Homo sapiens
  misc_feature (144)..(144): n can be a, c, g or t
  misc_feature (180)..(180): n can be a, c, g or t
  misc_feature (195)..(195): n can be a, c, g or t
aaagaagatgtacaaatgcttacataatcagaacagtgcaatcttaccaatgaagtttaccttgtgggagctacatttacttatttcatatattagttcaacaacataaatataataaaaatgcttttaagcaatctgattagngcaacatttatattaactacaaaatataccgtaaantgaaacatcttgttnaataggcctgtggg

SEQ ID NO: 195 - DNA, 436 bp, Homo sapiens
  misc_feature (421)..(421): n can be a, c, g or t
ttttttttttgttttgaaagaaagtttattggccctagtaaagttttgaggagctggcaagttctgattggtgtgtgacagtggtgggtaaaaccagttttgcagtcacagtaggttgttttaatagctgttagataaaactggttttaggttacaacaggtagttttagcaactaggtttgtagagaattatattttgaagcaatgctgtgtgccctgagtgcctttttcccctgggcctgtctaccctgttttagttgcatatgacaagaatgaccccatttgtttgatcaacttgtacagatcaaagaaagtttaattttcttttggggtaaagccagttaggcaaacacatacggtgtgtgatctcctcctcaccttcacttctttaaagccccacccccctttgtttttgacaggntttcagtttcagact

SEQ ID NO: 196 - DNA, 524 bp, Homo sapiens
  misc_feature (362)..(362): n can be a, c, g or t
  misc_feature (426)..(426): n can be a, c, g or t
  misc_feature (431)..(431): n can be a, c, g or t
  misc_feature (479)..(479): n can be a, c, g or t
cagggcccaccgctaatgccttaatgaaatcattttaacattatattctctacaaagaccttatttccaaataagataatatttggaggtattgggaataaaaactccaacatataaatttgaggaaggcacgatttcactcataacaatcttaccctttcttgcaagagatgcttgtacattattttcctaataccttggtttcactagtagtaaacattattattttttttatatttgcaaaggaaacatatctaatccttcctatagaaagaacagtattgctgtaattccttttcttttcttcctcatttcctctgccccttaaagagattggaagaaagaggaaacttgtcaactcnatatccatggttatctagcaaagtacataagaatctatcactaagtaatggtatccttcagganggtgntggggttaccaggtgacacccccatattccatcacaaaaatttaaggnaggaaggtcccataggtaatttatttggccaatagtgggattttt

SEQ ID NO: 197 - DNA, 402 bp, Homo sapiens
agagcaagaatgtgtgtttgtgttgaatgggaagggaagctagtaggtgtccaacaaaccctgccatgaatactggggccaaaaaagaggggacccgtaggacagatgttgatcccactcaaagtcagcacagcgtgatgcacttaaagggcactgagcacgcaggggctgtcacaaacccatgaggatctgcagggtgtctcccacaagtcatttctctcagaaggatcattacctggggacactggacacatatgtgcccatgatgatgaggacggtgcccacgaggaagcccaccaggccgatggcagtacccagggcacagaccagggtctccatggcatctggtggtggaataggcacctggagctctggcagtcatagacgtcctcggctgagggc

SEQ ID NO: 198 - DNA, 383 bp, Homo sapiens
  misc_feature (140)..(140): n can be a, c, g or t
  misc_feature (300)..(300): n can be a, c, g or t
ttcagaaaaatttaataacgtagtgcatttgtggcacacagggggagtacagatgcatgggaggccgtaggttaggtaaaggggagcactaaagttgaagatgaggcactgccatcaatgctgggacttcaggccaaggnatggagctgaggaagccacaaggatggacattttctgcagagttgctgaaccggtagcaaccagggcctgagaaagtcctctcttgtggaagaataagagccaagcaggaaaagcttttcatcatgcaaagctggggcagaaggttcccccttgaatgtnggtcatctgcacttcagctcacgagtcctgttgggtgaagtccagagtgccctttctgattcttgaagtagatgaatagcccg

SEQ ID NO: 199 - DNA, 541 bp, Homo sapiens
gactcctcagatgccaccaacaactccatccagcagtttcttcaccaagaaaagtgaagacacaatctccaaaatgaatgacttcatgaggatgcagatactgaaggaagggagtcattttccaggaccgttcatgaccagcataggcccagctgagagccatccccacactcctcagatgcctccatcaacaccaagcagcagtttcttaaccacgttgaaaccaagactgaagactgaacctgaagaagtttccatagaagacagtgcccagagtgacctcaaagaagtgatggtgctgaacgcaacagaatcatttgtatatgagcccaaagagcagaagaaaatgtttcatgccacagtggcaactgagaatgaagtcttccgagtgaaggtttttaatattgacctaaaggagaagttcaccccaaagaagatcattgccatagcaaattatgttttgccgaatgggttgctggaggtatatgctttcacacttgtggctgatgtgaatgctgaccgaaacatggagatcccaaag

SEQ ID NO: 200 - DNA, 433 bp, Homo sapiens
  misc_feature (199)..(199): n can be a, c, g or t
agagttgcaacaattcatctttatttcttattttcctctggagatgcagaatttggtatatttcaccccaggtatatttgggatagttggctcctcgctgggtcaggatggctgggtgccttctcccctggcatggttctcttctctgcagggcgaggggcagggagctagtagaacctcgcaatgacagccgcaatgncagacccaatggagcccaggatgaacttggtcaatccggagagtccagttgctcccagtgactgcagagtagccacaaggttgcccgaggaactccacccccattggcaatggccgccgcggacatcatcttggctgctatggaggacgaggcgattcccgccgcagtgaagcccatggaactgagcaccatgggcacagcgccatgggcacaactcctccaatcacaactgta

SEQ ID NO: 201 - DNA, 565 bp, Homo sapiens
gagtacagaggactttattgatggtacacgacaagatagagctctttgtggggtctgcatggaaactgtgaagaggggagattcccagtgtggtgggggactgagcatggcagggactgccatgaagctgaaggtctctttcttcctcttgtgctctcactggggctggttgtcgagcagtcttactccttggaggccatatgggccaccaccctgttgctgtagccaaattcactgttgtacgaggaaatgagcttgacaaagtggtcactgagggcaatggcagccccagcatcgaaagtggaagagtgagtgtcactgttaaagtcagaggaaacaacctggtgtccagtgtagcccaagatgcccttgaggggccctctgacgcctgcttcaccacctttttgatgtcatcatatttggcaggtttctccagatggcaggtcaggtccacaaccaacacgtttgcagaaggacaccgaaggccatgctagtgagcttcctgttcagctcggggaatgcctttccacagccttggcaatcaccagtaggatgcagggatgat

SEQ ID NO: 202 - DNA, 412 bp, Homo sapiens
cagcattattaacaaatttattgaacaactagaacttgacaagcacatgccaggtagaggggatacagtggagagcaataataatgatgataatgaggagtagtttttccctagcaggcagcagttgaaaggaatattggtttaacatccaccaatgagcaggggtggatagacccctctcctggagacagagtccataacgggattaaaaatatccctgtaagccggtcacccggtggctcaagcctgtaatcccagcactttgggagaccgaggtgggtggatcatgaggtcaagagatcgagaccatcctggccaacatagtgaaccctcatctgtactaaaagtacaaaaatttgttgggtgtggtggcttgcacctatatttcccagtactcgggaggctgaggcaa

SEQ ID NO: 203 - DNA, 459 bp, Homo sapiens
gactgaccgagtggccctgaggaacctgctccgccgctacaaccagagcgaggctgggtctcacaccctccagggaatgaatggctgcgacatggggcccgacggacgcctcctccgcgggtatcaccagcacgcgtacgacggcaaggattacatctccctgaacgaggacctgcgctcctggaccgcggcggacaccgtggctcagatcacccagcgcttctatgaggcagaggaatatgcagaggagttcaggacctacctggagggcgagtgcctggagttgctccgcagatacttggagaatgggaaggagacgctacaggcgcagatcctccaaaggcacacgttgcccaccaccccatctctgaccatgaggccaccctgaggtgctgggccctgggcttctaccctgcggagatcacgctgacctggcagcgggatggggaggaacagacc

SEQ ID NO: 204 - DNA, 482 bp, Homo sapiens
  misc_feature (6)..(6): n can be a, c, g or t
  misc_feature (173)..(173): n can be a, c, g or t
  misc_feature (177)..(177): n can be a, c, g or t
gcgacncgcctcagtttccctggccgtaaaacgcgggcgatgggcgctcgatgccccgggagacgccgtgtaccgcgggcccttccggcaccgggtcctccttcaggttcgggcacccggctgcctccacgcggggcgagcgcggcgatgggatcggtccgtgctgcgctcancccntttcgctatccctctgctccaggggcagcaaaatcagcagatgagcccccagcgcgcctgcggcccacacactgcggccgtaacagttaaacagacggggaacattcatgtgcgtagagctcttcacggggcgatacagaaatgtgtcgttctaaagcgttaacgacctgcaattttgcatatcctccaacacatggattttactgatttcaattatgggatgtgttgcaaagaatctgctgctccgctatatgggaacactttcagttttccaagttaaaacatgaaattgcacatcatcattt

SEQ ID NO: 205 - DNA, 187 bp, Homo sapiens
  misc_feature (156)..(156): n can be a, c, g or t
  misc_feature (181)..(181): n can be a, c, g or t
cttccatggagattttagatccgatgttactgaggaattaggtagctgggcggctttaccccaggcatctcttagtaggtaacaccttccttttcaggatgggattcacaagggcccttggtgtctggaagcaccaactgaacgcaggcctcggangatcaagacggtccccaccacaatncccacg

SEQ ID NO: 206 - DNA, 344 bp, Homo sapiens
ttttttttttttttttatctcaggatatgtttaattatgtaaaaaagctctaaagtcaggtaatggttttcatgtgcttctcttgagcagtctgaggagagaatagaaacagaaaccccttgggctctgagtagacgcagctggccatgcacaggcagaggctctgggtcagtgcaggaagcagagtcacagccagcgccttggggtggggatgaaaggagatgacctggtggctgcgtgacagccactgtaggactctgatctcagggggacaggctgacacaggcagttgggaattctgggcagggacaagcaggcgttacagaaaagtgataaccaatccc

SEQ ID NO: 207 - DNA, 248 bp, Homo sapiens
  misc_feature (94)..(94): n can be a, c, g or t
aaaaaaaaacggagtttattgtgcagggatagtcggggtagtggagagaggccatttagtagtgggggcttcgctcacccccgatagcagaccnaggaagccaagaaggatgtgcagcggcggactggttccaagccccttcagaggcgcggggtcttagggggagggactggcttccgggcccaagtaggaggcagtccggctctcaggagtgctataaatggttaaagccccaggcaggcccaggg

SEQ ID NO: 208 - DNA, 417 bp, Homo sapiens
  misc_feature (361)..(361): n can be a, c, g or t
  misc_feature (368)..(368): n can be a, c, g or t
  misc_feature (379)..(379): n can be a, c, g or t
  misc_feature (408)..(408): n can be a, c, g or t
ttttattgttttagtaatcttaacataacttaaaataagagaggggaaatgacatctggagatctaggtatgtggcccattgcaattgagcacatttcttgggtctgtttctctatctctaagggcagtctcaaaaccccagctcaaaatacgacactaacatgatgaacatgcatgagctttgaaaagtgctctgtagtcttatgatgatctagaagagcactgtccaatagaactttctgtgatgatgaaaagattctacttctgacctattcaatagggtaaccactaatcatgcatggctctcaagcacttgaaatgttgctagtgtgattggggagctgcgttttgaatgttaacnaatttanattttaaatcnttaaaaagtttacatgtgggttagtgggncgccgtacg

SEQ ID NO: 209 - DNA, 396 bp, Homo sapiens
  misc_feature (235)..(235): n can be a, c, g or t
  misc_feature (329)..(329): n can be a, c, g or t
  misc_feature (352)..(352): n can be a, c, g or t
  misc_feature (358)..(358): n can be a, c, g or t
  misc_feature (372)..(372): n can be a, c, g or t
attcggcacaggatgagcagaagaggttatcagcattaaattgttttggttctaaatttggaacagtatatataattaaaagtaaggaacattagaggatttaattagaataaatacatgttttggaaatacagtgacctcttgcagtgtcacaaaagtgcaaagtgatattagctgtcatctgcaatacagaatctcattgcttttgcacatggagcatatagggaaactccanacagatcacaatgagggtttctaaatctgttggggttctgtcttctattggggttctgtgaaggcaaaccactgtaggctttagctggggttcngtcctatggactcgttggggggnatgccntgggtttttccatncttacctggcagtcttgggggggt

SEQ ID NO: 210 - DNA, 307 bp, Homo sapiens
tttttttttccatctttgagttatattttataatgtaatgtgtttgtcgtacagggtgagtacagatgcactgtaggccatacggttttggcaaaggggagcacaaaagttgaagatgaggcgctgtcatcaatgctgggacttcaggccaagggcaggagctgaggaagccactagggaggacattttctgcagttgccgaaccagtagcaaccaggtcctgagaaagccctctcttgtggaagaataactgccaagcaggaaagcttttcattctgcaaagctgggacagaaggttcttccttga

SEQ ID NO: 211 - DNA, 466 bp, Homo sapiens
aaaaagctgtgcagtgtgatgtgtcccaaacggactggctcatgggtggccacgtcacaacctctgatctcagaccgtgcatgccttgtcctcttaagacaactcctgtggcaccgtttctccctccacagggccaaagccatagtgtccggtcccaaggacaaggctcttccagtgctaggagaggtatgagcagcctctcacctgtgagctgtggggatcacaaggctgcctgcctcagtcttggagtcctgttgggtgaatgaggcagatgggaaagagcctcaccagcagctgcttttggagcaggggtcccaggaagagagggtgggctcgacatcaaactgcctggatttttctaccaccctgttacatcataacaacttctgaaacacacaccagccctgagttctgggctcatttgaagcctggaatagcaataaacctttttagattgcgggcagtt

SEQ ID NO: 212 - DNA, 440 bp, Homo sapiens
ctggaaggttctcaggtctttatttgctctctcaacttccaggaattgacttatttaattaatccatcaacccttcatagcaaatatttgagaaaacaaatttatattcaggttcttaacttcattagggaagtaagaagttgcagctcagcgcaccatgaagttgagacagagatggagacatccagcccacttctctggaacaggaaagatgatcggggagggaacacaggtcagtgtggggacaggggtcacggtggacacgggggtgggctgtctctccacctcctcacattatgctaacaggaacgcagacacattcagatgcctttgcagaaagagatgccagacgtcttgaagtcacaaaggagaggtgtgaagaaatcctgcatctcagtcccacacaggcagctgtctcaggctttacaagcgatgagaga

SEQ ID NO: 213 - DNA, 455 bp, Homo sapiens
  misc_feature (384)..(384): n can be a, c, g or t
  misc_feature (424)..(424): n can be a, c, g or t
  misc_feature (448)..(448): n can be a, c, g or t
accaacccatgcaagaccatgaagttcatcgtgtggcgccgctttaagtgggtcatcatcggcttgctgttcctgcttatcctgctgctcttcgtggccgtgctcctctactctttgccgaactatttgtcaatgaagattgtaaagccaaatgtgtaacaaaggcaaaggcttcatttcaagagtcatccagcaatgagagaatcctgcctctgtagaccaacatccagtgtgattttgtgtctgagaccacaccccagtagcaggttacgccatgtcaccgagccccattgattcccagaggttcttagtcctgggaaagtcaggccaacaagcaacgtttgcatcatgttatctcttaagtattaaaagttttattttctnaagtttaaatcatggttttttcaaatattttttcaaggtngctgggtcccttttaaaaaatcanctttttt

SEQ ID NO: 214 - DNA, 366 bp, Homo sapiens
taatcaatgatttttatctctgaaaatggaagcaagtgttttgacagaacactatggccactctataagagccgacctaggagtaattcactgtcctcttctgggatgtcatggcttaaaaaaaaaaaaaaaaaagacaaaacaggaaaataatccacaatgctttgggcgcctactctgagcttggctgggcatccattcattaaataagtcataagctacaaactaagatcagggtaactttcccttgccctcctgcttctctttgaaccacatgccctacggtgtttcaccaccatcaacaactttacttcattaattcgatatcagaaccttaaaacactactgaatcttagacaaaaggtc

SEQ ID NO: 215 - DNA, 419 bp, Homo sapiens
tttttttttgggaagaagccttggctttattcgctctgtggggacactgttccgttcagaggcccctcccagccatggggtgggggacagtggtgggcgtgggaatcccagcgagcatcctggagggtgcgtcgtctccatgtattttgctcttccccatcttttccatggggtcccctgccagggtcaagcactaatatgtggtgaaggcagcaaacagcgtcggcgtccctttaggggtggggagagggctgtagcaccaagaaccccctcccccgcccacgacatccctgaaaaggagactaaaataaagccccggggcctttctacgtaggggctccacttaaatatggaatggtggtaggcagagaggcggtggcccagcaatccttaagtccagattaccagctgtggggagg

SEQ ID NO: 216 - DNA, 353 bp, Homo sapiens
tgcattaatgctgttagtttaatgtggacagagacatcccacggcgtgactgttagttaggatgagtcagcttgggggagtttgtgcttcctgcttggtgtggccagccacatgccaaggtcccctgccttctagcccagaatgacgggactgggcagaacacccccaacttttagctgccacttggctcattacagcagtaccagtatgggggtgggaggggtgaggctgtggagtgaaggcggcgtatagggcagagactaagaggtcctgtgagattcttagaggagccatcctgctccaaggggcctgagctgagtgtggtctgtgagcatctgctgctcctctcagag

SEQ ID NO: 217 - DNA, 601 bp, Homo sapiens
ttttttttttttttttttttttccttttaatgaaaatgatttaacttagaaatctgttgtgaaacttttgtctagttttgcaattctcagatattccagtgcaaaaatagatcccattacagacagcgtaaagtgcttggaatgagggccaatgatgaacaaagagcacaaaaacagcttcatcttagggtataagaagggataatagcatacctaaatccttatggaaatagaaacattctaagggggatgcaacaattttgaaaagaattagagcaatatttctacagtattacattattactagtagataataacaagggtacaaattaatgtctcaatatcaaagtggttcagtattacatgacacatggctctttggaaaatattttacctgatatatacaaccacaagaagaaaacacagacaaatggctttagtcaatgattactatacagtgaatgaatgatgtgcaacatttaatagtcacaaagcatttgctttcagtacagataatgaaatacagtagtgtgaggtttggttgttttttaacaatgaattgtgctgggcatttatgtatagagggcttattattttcttc

SEQ ID NO: 218 - DNA, 388 bp, Homo sapiens
  misc_feature (91)..(91): n can be a, c, g or t
  misc_feature (223)..(223): n can be a, c, g or t
  misc_feature (292)..(292): n can be a, c, g or t
  misc_feature (314)..(314): n can be a, c, g or t
tgctgttagtttaatgtggacagagacatcccacggcgtgactgttagttaggatgagtcagcttgggggagtttgtgcttcctgcttggngtggccagccacatgccaaggtcccctgccttctagcccagaatgacgggactgggcagaacacccccaacttttagctgccacttggctcattacagcagtaccagtatgggggtgggaggggtgaggctntggagtgaaggcggcgtatagggcagagactaagagggtcctgtgagattcttagaggagccatcctgntccaaggggcctgagctgagtntgggtctgtgagcatctgctgctcctctcagagaggggagatctcactctctgccagtctgtctagccccaaag

SEQ ID NO: 219 - DNA, 282 bp, Homo sapiens
  misc_feature (230)..(230): n can be a, c, g or t
  misc_feature (263)..(263): n can be a, c, g or t
  misc_feature (272)..(272): n can be a, c, g or t
aaaacactttattttccacaaggaagagcaataggaaaaattaaatcatttcccacatattgttttcttaaaacagagcctacaaggacatattaagcaccaaataaaaaaggaaaaaaagagaaattacaaacagccatagaatataatctataaagcaaacatttaatattgcactttgttttgctaacattttgggttttacttttcctaattggaaaaatcagggnatctatcttggaatactggggattccaagtgtngaccccccncatccttatt

SEQ ID NO: 220 - DNA, 386 bp, Homo sapiens
ttttttttttttaaaaatattcagaaccaagttttattttgtagtcgttacacaggagggggcagtcagaagagtacagctcacccccagcagtggaggggttaaatctcagggacaacgtggggcagtggggacagcacctccgaccctatggggtgtaccttcaagtagcaaggctgacagtgatgtctagaagggtctccacttctgcctgagttttgccaaacccagtggtctatagggatgtggcaaaagaatgacctaccgcagtgtgattatcagtgttttctaaaataaagagcacggttttgcctttaaaataattcacatcaacggtatttgggagaacatggagctggcataacattgggcgtagaaagcagggc

SEQ ID NO: 221 - DNA, 476 bp, Homo sapiens
  misc_feature (1)..(1): n can be a, c, g or t
  misc_feature (5)..(5): n can be a, c, g or t
  misc_feature (183)..(183): n can be a, c, g or t
  misc_feature (215)..(215): n can be a, c, g or t
  misc_feature (225)..(225): n can be a, c, g or t
  misc_feature (277)..(277): n can be a, c, g or t
  misc_feature (301)..(301): n can be a, c, g or t
  misc_feature (318)..(318): n can be a, c, g or t
  misc_feature (364)..(364): n can be a, c, g or t
  misc_feature (401)..(401): n can be a, c, g or t
  misc_feature (444)..(444): n can be a, c, g or t
  misc_feature (450)..(450): n can be a, c, g or t
  misc_feature (465)..(465): n can be a, c, g or t
naacntttgaggcaatttattaacccagcatggtttgttctaatgcttcttgttggcaactgccacctgtccagcgattctgtccagatctctctgtccctgacgtgtcagtttgcggcccccatcttggtccttttccaccatttttagcccctccagggcttggaggacccggtgggccanattcttgggagcctcggctaaagtggccaggnatgccgccanttctctgacatcccccatagatcttgggtcatggagccaaccccagcgccancccagaggtacaggtgccacgctntggaagcagctcgcgtntacaaccagttctcatcgtaggggagcaagctctttgtgcttgggncagcagctttgaagggtgttccacccatttcgggganttttcaggtttcccagatttttttgaggaagggttgccagagntttgantgaattcctgttggntcaaaaatttt

SEQ ID NO: 222 - DNA, 271 bp, Homo sapiens
tgctctccctcaaaggaagtgtttattttttggagctcaaagaccccagaaaaaagcaaccccccccgcaaaaaaaacccataacaacaggcagcacatgccccccacaccgcaccccatgcccaatctcagggtgggagacaagaggggggactcattgtccggagagaggctctggagggagacagccctgtgtcaacccgactgtgtccccacacccaggacttccccatggcccctccagacctgctccagaggcccttctccggct

SEQ ID NO: 223 - DNA, 425 bp, Homo sapiens
tttgatttaaaagattttattttctttatgcaggtaggcagttagaaatttcaaagtctaacaatgacattcttgaagtgggcacagccttttaaactcaggctatgtatacagtaaccttgtggaactggttcagccagatcttcactttcatgaaagcacagggtctgtccttttctttccagagggctcctctcatattccatcgccagtttctaagaaagaaggtggattacaatcagtgctccattctggtctataccgcttcttgtttagggtatgaaaatacatgtgactaagacctggtcactccaagtccatcccctttatcggtacggccaagtaccgataaacggagctgggaaacttcccaatctctaataagacaactttaattctgtacttttattgaatcccatattgta

SEQ ID NO: 224 - DNA, 505 bp, Homo sapiens
  misc_feature (433)..(433): n can be a, c, g or t
ggaggcagggtctctccgtagcccagcctggactacagtggcaagatcacggctcactgcagtctcgaattcttagaatcaggtgatcctcctgcctcagcctcccgagcagctgggactaccagggcataccaccacgcctggctaatttttgtactttttgtagagacggggtttcatcatgttgctcaggctggtctcgaactccttagctcaagcaatctgcccgccttggcctttcaaagtgctgggattacaggtgtgaaccaccgtgcctggctgactacagttttttaattgcacgtttgttctttgaactgaccactgtgggcattccatgcttcctccactgccgcctttttcccaagctgaaaagacaaggaagatgtggcatcaaatcaaccagaaagagcacgcctggacctcccatcancacgtaacaacaggtgcacatcaaagctgtactcaagaaaaggtagacatagaatgataaatccccaaaatg

SEQ ID NO: 225 - DNA, 535 bp, Homo sapiens
  misc_feature (35)..(35): n can be a, c, g or t
  misc_feature (64)..(64): n can be a, c, g or t
  misc_feature (167)..(167): n can be a, c, g or t
  misc_feature (183)..(183): n can be a, c, g or t
  misc_feature (224)..(224): n can be a, c, g or t
  misc_feature (287)..(287): n can be a, c, g or t
  misc_feature (298)..(298): n can be a, c, g or t
  misc_feature (424)..(424): n can be a, c, g or t
  misc_feature (446)..(446): n can be a, c, g or t
  misc_feature (455)..(455): n can be a, c, g or t
  misc_feature (461)..(461): n can be a, c, g or t
  misc_feature (499)..(499): n can be a, c, g or t
  misc_feature (521)..(521): n can be a, c, g or t
  misc_feature (530)..(530): n can be a, c, g or t
gacagtggatactgagaatgatcaagtaaatgganttttgaacaggtaaagaggaaacaaaganttaaggtatccctgtggaatagtgcaagaaaggagtgccccacccatagtgttatctacaataggtactccggggaaaggaccccaaggagtcagaccacaantgtatgaccagcacanttctatgatcaaactctacctctagcaaggcgtctcaacantcaagttctatttaaatcattcgctcgtgtcttctttcagtcatggatggaaataatgaggantatcatagggnacaggagggtaatgcattgggtcaccacccttgggagagggctgggtggggatgtatctggggattaggtccctcacgggggggggtgcctatttttccctgcataggtcttccatttatcccagnccaccatgggttcttttacccntgtttgggnggcccnaggggtcccacactgggggccccggggggcaccggggncagcttcgtagggattttgggncttgtcatnggggt

SEQ ID NO: 226 - DNA, 404 bp, Homo sapiens
  misc_feature (106)..(106): n can be a, c, g or t
  misc_feature (298)..(298): n can be a, c, g or t
  misc_feature (302)..(302): n can be a, c, g or t
  misc_feature (379)..(379): n can be a, c, g or t
caggcatttaacgacgactcacacgatcacttaaatacaacttgtggtgaaccgcacaagagggacgcgcggcggtcttgcggggaatgacgaggccgacctcgtntgcgacccagggagggcaagggtggaccaggcaaagggaacagaggactgggacctgggaggtgggcgggaggcgtttggttcattggaggaaaggaatagccctgtgtgtgatgagcatttgagaggaggtcttggcgagcaccatcttagggcttgaagaacttaggcagtggcttccagcgtgggggcngttngggggggacaagttgagccaggggcaagaagatttgattttttggcccttagagtacgggtttcttccaaatttttnaacctttcggcccttacagatcttt

SEQ ID NO: 227 - DNA, 360 bp, Homo sapiens
aatgatttccactttatccctttacaacagagtaaattaagcacacagcttgattgaaaagatactaagaactaaactgaacccggtactaaccattttcaaaggctcactacacaaatcacacggtctcctgcaagtctcctgttagcataagccttgacaggtcactggaggaattaccctaaagattcacattacaatccagatacagggggctgccgtggctcgctgaaccacctgcccttattgacccagctgagattgtccacaacagtataaagaaaggactttggaatctgaccatcagtgacatgtggccagcgcccctccctcagctgctctgccttcagcatctgctgt

SEQ ID NO: 228 - DNA, 366 bp, Homo sapiens
gtaatttatgaagatcatcttttattaaaggactaaatgaaaaaagaacaactttggcaataaaattcagcctaattacagcttttcttggccgcatccttagatgtcagtatattaagtgtagaccctagttgttgaagcatctaacatatatctatctatataggtagatatatagatataggtatagataatattaaactgtggaacttctctagtgataactcactaatacattacaactagagtagccctaaggtccaaggtattctttcctgtcccactgccccagaaagagctaatcggtctccctgctcattaagactgtatgttcaaaccacagcaacagaagggtttggctgcatc

SEQ ID NO: 229 - DNA, 512 bp, Homo sapiens
aagagaagtctggggaaggttcactcatcatagaattttggcagttcattgcccaagatgactcgatggtccacaccggcagctgtaatagtgaccaggtagatgacacccccgcttgagccatcccggctcatggccagagcaatagcgtctgtggtgaagcgcctgcactcctcgggagacatgcctggcttatatgctgcatccacataaccatagataaaggtgctgccggagccaccaatggcaaaaggctgtcgagtcagcattcctcccagggttccatatacctgacctccttcacgttggtcccagccagctaccatgagatgtgcagacaagtcctctcgatatttatagctgatatttctcaccacatttgcagcagccaaaacaagtggaggttcctcagttctatccatggagctcagctggtaggcgggcatgtcggcacggcttgggcatcacagctgaacagagagtgcaagtagatgcgccgtgcaggggggaca

SEQ ID NO: 230 - DNA, 349 bp, Homo sapiens
  misc_feature (62)..(62): n can be a, c, g or t
  misc_feature (146)..(146): n can be a, c, g or t
  misc_feature (148)..(148): n can be a, c, g or t
  misc_feature (169)..(169): n can be a, c, g or t
  misc_feature (176)..(176): n can be a, c, g or t
  misc_feature (180)..(180): n can be a, c, g or t
  misc_feature (200)..(200): n can be a, c, g or t
  misc_feature (203)..(203): n can be a, c, g or t
  misc_feature (244)..(244): n can be a, c, g or t
  misc_feature (299)..(299): n can be a, c, g or t
  misc_feature (304)..(304): n can be a, c, g or t
  misc_feature (313)..(313): n can be a, c, g or t
  misc_feature (328)..(328): n can be a, c, g or t
tttttgcaaagagcaaaggtcaaatttatttaatacaacatccacgagggtccctgcagctntgtcactgaggcaaacaggaaaagtgattttggctaggcgtggttctcatctgtgaaattccacagcgcaatgacagcagcctntntcccacccactcaagacactntcaggantgtnttaagacctcaggagaccanttntttagcaagcaattttgttttttgttttttttgagatgggnttctcactctgtcactcaggctgggagtgcagtggcgcgatctcccgctcactanaaccnccgtttccnggggggtcaaggggntaatttcacctcaggcccttg

SEQ ID NO: 231 - DNA, 453 bp, Homo sapiens
gcgaccgctgccagtgtcgcgcgctgggctcgggcatggcggtcgactgctccacgctgacctccaagtgtctgctgctcaaggcgcgcatgagcgcccaagaacgcccgcacgctggtgcgccgtagtgagcacgcgctcgtggacaacgatggcctctacgaccccgactgcgaccccgagggccgcttcaaggcgcgccagtgcaaccagacgtcggtgtgctggtgcgtgaactcggtgggcgtgcgccgcacggacagagggcgacctgagcctacgctgcgatgagctggtgcgcacccaccacatcctcattgacctgcgccaccgccccaccgccggtgccttcaaccacgcagacctggacgccgagctgaggcgttcttccgcgagcgctatcggttgcaccccaagttcgtagcggccgtgcactacgagtaggccaacatc

SEQ ID NO: 232 - DNA, 479 bp, Homo sapiens
  misc_feature (173)..(173): n can be a, c, g or t
  misc_feature (398)..(398): n can be a, c, g or t
  misc_feature (423)..(423): n can be a, c, g or t
  misc_feature (429)..(429): n can be a, c, g or t
  misc_feature (470)..(470): n can be a, c, g or t
tcccgaatcagtgggtggaggcaaaacccttcagcaagaagagaagcaacttcagccgtgtatgcaaatggataaccggttgcctcccaaaaaagttccaggtttctgttcctttcgctatggattgtctttccttgtgcactgttgtaatgttataataacagcacagcgtngtcgcctgaacctcacaatggtagtcatggtgaatagcacagatccacatggtttgcccaacacctccacaaagaagctcctggataatataaagaaccctatgtataattggagcccagatatccagggaatcatcttgagttcccacctcctatggtgtcatcatcatccaagttccctgttgggatacttctctggaatatattctacaaaaggaaatggantgggcctttggattatggcctcagnctctgnggttaaagcctgctcattcccaccagcagctgggaattggngtaagcttg

SEQ ID NO: 233 - DNA, 354 bp, Homo sapiens
  misc_feature (157)..(157): n can be a, c, g or t
  misc_feature (264)..(264): n can be a, c, g or t
  misc_feature (302)..(302): n can be a, c, g or t
  misc_feature (307)..(307): n can be a, c, g or t
  misc_feature (318)..(318): n can be a, c, g or t
tttggcagtgcttactttgttctcacagctatgatctaaggtctgtagatgccacacacaggtgaaacaatgtggtatttataatgtgtctgggtcagtgcctggcacatgggcaaatgcttaataaatggtagttcccctctgaccctgacagttncaagggtttggagtgacttgcggatgattctaatgtcccagccccacacacaagtcttcctgtatgggaggtcttctcctagggtaaaagaaagtaccacttgcttntcctttcatttccttctcaagctccagtttgatgcttnacttngtctatctgtnggaatatttatagggttatccactttacttcccaca

SEQ ID NO: 234 - DNA, 386 bp, Homo sapiens
  misc_feature (264)..(264): n can be a, c, g or t
  misc_feature (345)..(345): n can be a, c, g or t
ataagtaaaagatctcctaaatggaagatgcacagagtagatttacaatgctccaattcctctcttacagcaatattgccttcacagttataaactgtattcaaatagtaaaggtcaccctctcgcttccctggctggccccagggctaccactggtattcctgagcctctcccagctccacttctaatgctagagaatgataactaagatttctgtgcatttgaaggttgttggaaagttacaggttcattttagaaagaaangctgttcttgacagcactcctgagccatcatacctctttcccatataaactattttcacagatctcaactaaaaccccttnactttcacaaaatggattgtggttggtgctggaaatggtgc

SEQ ID NO: 235 - DNA, 262 bp, Homo sapiens
ggatccgcgcctgtagtacaagacgttgctcatcagcagcttgagccccgcgctgcccgccgagcacctcgaggaccggctcttccaccagttcaagcgcttcggcgagatcagcctccgcctgtcgcacacgcctgagctgggccgtgtggctagtgtgaatttccggcacccacaggacgcacgcgaggcccgccagcacgccctggcccggcagctgctgctctacgaccgcccgctcaaggtagagcccgtgtacctg

SEQ ID NO: 236 - DNA, 420 bp, Homo sapiens
taataggagcttccagctctaataaaacagctgtctctaacttattttatttccatcatgtcagagcaggtgaagagccagaagtgaagagtgactagtacaaattataaaaagccactagactcttcactgttagctttttaaaacattaggctcccatccctatggaggaacaactctccagtgcctgggatcccctctgtctacaaatataagattttctgggcctaaaggatagatcaaagtcaaaaatagcaatgcctccctatccctcacacatccaggacatcatggaattttacatgggtactcttgttgagttctataggaggccttctggatgtctcttaaaggcactaccgatttcttttgggagttggttcacattcaggttaaggacatattcttctaattttccct

SEQ ID NO: 237 - DNA, 153 bp, Homo sapiens
  misc_feature (59)..(59): n can be a, c, g or t
tgaggattgaaaaattatctttattatcttgagtgggagctggagctggaagtctccanttctccctccaacaactcagctcccattgtacccatctggggacttagatgaagttacaggtcagttattggacagctcacaggcctcttgatt

SEQ ID NO: 238 - DNA, 317 bp, Homo sapiens
  misc_feature (273)..(273): n can be a, c, g or t
aacatttttttatttttatttttttgtgaaaaagttctgatgtcaactcatgtttggtatgatagattttaaagggctaagatatagagaatcacattcctttccaggagttacttttgctgttatgtccttctggattctacaatataaatctactcctagaacatcacattccttctttcatttcttcttctctcttcctttcttttcttatttgtctagtagagataagctataaaattctaccactaggcaattccaatctgaatttcnttttttcataatttaattctttaaattatctgaagtgggattag

SEQ ID NO: 239 - DNA, 539 bp, Homo sapiens
  misc_feature (461)..(461): n can be a, c, g or t
  misc_feature (515)..(515): n can be a, c, g or t
  misc_feature (523)..(523): n can be a, c, g or t
ttttttttaaacacaaagtctcatttatttttgtctgaagcacacaggagctcactcagcacaataacagtaagcgaatcatacaaatattgagaaaaaatgttcctatgaatacatacatgtatattcttaagagtagcgatcaggagtttaacaacaaatgtaaagtggttttctctaaagaatgctttctgacaggcttttgggttggaaatggacaggtaaatcactgtcacataacaggtaagctaagaataacttctgttacccaagtcatttgaaccctgtggactgtgaaagccctcttgggaatttacatttaattccatcattggtctggttgacttccacatttcactaaatttgggacaaggtccacaaagtaactcctcaactctcagtcttttcacactcaggtctgtggggaaggaaaggcagttgaggaccgggttttgaacacntgcacggagaccattgttagggtttttctaacagtatccctctgtttctggcanttccaagncatacccaaattgggt

SEQ ID NO: 240 - DNA, 283 bp, Homo sapiens
tttacgatttaaaattttaattgttaccaaacaaaaatatccactcaaaatacaattcaacaatgcaacagtcatcttacagcagagaaatgcagagaaaagcaaaactgcaagtgactgtgaataaagggtgaatgtagtctcaaatcctcaaagagttgtgtttatttcatcgacaaatagattattcgtattcaattctgatgtgttttaaagactaagatgctcattttacgattagcgcacatgtgtatattgtcacctgttctccttagaaaaatgc

SEQ ID NO: 241 - DNA, 399 bp, Homo sapiens
  misc_feature (195)..(195): n can be a, c, g or t
  misc_feature (244)..(244): n can be a, c, g or t
  misc_feature (248)..(248): n can be a, c, g or t
  misc_feature (281)..(281): n can be a, c, g or t
  misc_feature (305)..(305): n can be a, c, g or t
  misc_feature (345)..(345): n can be a, c, g or t
  misc_feature (352)..(352): n can be a, c, g or t
  misc_feature (363)..(363): n can be a, c, g or t
tttttttttttttgcagccagcttgctgtttactttcaactcaaagtgttttctgttgtatatccatgtcatcacctcttatttatcaggaagtgacacaaagtaacaggcttcacaatgccatcaatgtcattttgacagcattcatgtcacaatacacaatcatgtactgtaattatacaaaatccaaaggantaaaatgttactagttacactcgttaaaatgtaaactggacaaccaaanggantaacaaaacaaaaaggaaatctctgatcaggantccataggggacatttggacaatnttacaaaaaaaggtggttcaaatatttggtcccggcatgnctggcgnttcattggccnttaactttcattaattccccggctctttgggggggg

SEQ ID NO: 242 - DNA, 505 bp, Homo sapiens
  misc_feature (403)..(403): n can be a, c, g or t
  misc_feature (412)..(412): n can be a, c, g or t
  misc_feature (422)..(422): n can be a, c, g or t
  misc_feature (427)..(427): n can be a, c, g or t
  misc_feature (465)..(465): n can be a, c, g or t
  misc_feature (473)..(473): n can be a, c, g or t
aaatgactctaatctggagacatttgctgagacccttgtgcctggtcacttccgctcccaggatccttgagatgcatcctttcctgagcctaggtacttcccggacatcagtaaccaagctcagtcttcatacaaagcccagaatgcctccatgtgacttcatgcctgaaagataccagtcccttggctacaaccgtgtcctggaaatccacaaggaacatctttctcctgtggtgacggcatatttccagaaacccctgctgctccaccaggggcacatggagtggctctttgatgctgaaggaaacagatacctggattttttttccgggattgttactgtcagtgttggccattgccaccccaaaggtgaaatgcagtggcacaaaagcagctcggccgnctgtggatnacaagcaccntcttnttccaccttccaatgcatgattatgcagagaagcttgncgcatttnttcctgaggcttttaaggtcattttttggtga

SEQ ID NO: 243 - DNA, 354 bp, Homo sapiens
  misc_feature (180)..(180): n can be a, c, g or t
  misc_feature (271)..(271): n can be a, c, g or t
  misc_feature (322)..(322): n can be a, c, g or t
  misc_feature (334)..(334): n can be a, c, g or t
  misc_feature (347)..(347): n can be a, c, g or t
ttttatgaactttaatcatagcaaatgtgtttttacggtagtcataaaatcaacattaccacatatacaaaggacaagacaccagtttggcatacaaaaataccatatattaaaattgggttcattggaaaactcaggactggctaagacaccatctataacagagagagcaagcaagantgcttttaaggacattcagatttataaacaggcagcttgatatcccctttacggaagtcaatatttgggcaacatttgggacaatattttnctacacagcccggcagctcatttatctgtaggggctatttggggccctttnaaaaaaaaaaanaaaaaggctcccnaaattta

SEQ ID NO: 244 - DNA, 542 bp, Homo sapiens
  misc_feature (1)..(1): n can be a, c, g or t
  misc_feature (47)..(48): n can be a, c, g or t
  misc_feature (197)..(197): n can be a, c, g or t
  misc_feature (232)..(232): n can be a, c, g or t
  misc_feature (362)..(362): n can be a, c, g or t
  misc_feature (424)..(424): n can be a, c, g or t
  misc_feature (442)..(442): n can be a, c, g or t
  misc_feature (449)..(449): n can be a, c, g or t
  misc_feature (458)..(458): n can be a, c, g or t
  misc_feature (466)..(466): n can be a, c, g or t
  misc_feature (490)..(490): n can be a, c, g or t
  misc_feature (502)..(502): n can be a, c, g or t
  misc_feature (516)..(516): n can be a, c, g or t
  misc_feature (521)..(521): n can be a, c, g or t
  misc_feature (538)..(538): n can be a, c, g or t
nagcatttacattatattagggattgcacaagagaaggtatgtaggnnatatgcaaatactgcaccattttacataagggacttgagaagcatggattttggtagccacaggggtcctggaaccaatccctcacagacacagacggacactttacagtagatgaacacaaagatgaaagggaaagtctgacctaggnctgcggggagaagtggaactccatttttgacaggngatgccattttttgttttggacatcggccctctgtagttctttccattcccagtcttgcactctgaaagatacatttacttttcaaataaaactgcatctctcatcctaatgattatgggaggacttccngttttcagccattatcacacattgttgctctttactgtgatattgggaatgccctgcagggnggaattctttgtcctctnacatttngctgcacantcttctcngcttcctgcccccagctgcttctnagggacactgancagtgaaggccccnggggnattcacataggcatccngggg

SEQ ID NO: 245 - DNA, 578 bp, Homo sapiens
tttatgctaggcaaggagggatgattatttattagcttctacagattagacaatggggtgggggtgggctcaaggtgagatgattttttgggtccaagtctactcaagacaggcatcccagtcttcggtctccaaatccacctcctgtctgtccccccacactgctcctcaggccttgtggatccattgactgtgatttctgtggttcagctcccacatcaggcaggaagggcagctactgggtctgagatcccacattgcctccaacccttgcttcctagctggcctcccagggcaccacgaggggctgggccaggctgctgtgctgcacgtggcaggagtagggggctgtgtcctgcgggggcactgcaccaccacccaggactggtaagtgccatttccattgtgaagaacatctcccgtactcaggctcctgcacctcgcggcccgagtccagtgcacatcaatttccctgggtagaagtcgtaggccagcacttcagtttcttcttttctcctgggggctggtggctggtgacaccacagagggaggatctgccggtccaggatatttttgct

SEQ ID NO: 246 - DNA, 450 bp, Homo sapiens
  misc_feature (140)..(140): n can be a, c, g or t
  misc_feature (305)..(305): n can be a, c, g or t
  misc_feature (378)..(378): n can be a, c, g or t
  misc_feature (434)..(434): n can be a, c, g or t
  misc_feature (442)..(442): n can be a, c, g or t
ttttttttttgaaagggaaacaaaatggtgctttattttattttatttattttaaaaaggcgctacagtggcaggacgctgctggggatggggacacacagtgtaagtggtagattttccaagacttcccctccctattntcctccgagttcctctcttcctggtcctatcagtagcataggattcaacaaaagccttcatggaatgcctctttatttctgaaaaggaacttctacccctccctttcccatttccagacttgaaatccttcatcagctatctcacttccatgttgaaaccagggnccactgattgtaagtctgaaaatctggggtgtcctaccccataaccagggccaaggatatctgcccccaatgnctaaagtcttctgaatatttcctttctgtaacattcaatatatttggggcatattntacatctnttattaca

SEQ ID NO: 247 - DNA, 412 bp, Homo sapiens
aaatctggattatgaaaatatagtacccatgagcatttcatgttagaaaccccatttaaagcactataaggctgaataggcacaagcgattaaaagtagatgccaggccacataaaaataaatgttttaatttacttagagctgtattcaagttgtttgataccagacagaaagctgacagtctgttctttgtaaactgcctttccctgtttttctgttttgttttgtttctcaagtttcattttttactaagccccttctgacacctaggcagataaagataagagtagtgcgcagtacaaatgtcagctctgaagaggaggaagtaaatcttcaatgctagggcagatcttcactatccgtgatccagtcttaatttgagcatgagagcaaaatttagtcatctacacaa

SEQ ID NO: 248 - DNA, 462 bp, Homo sapiens
actttagacaaaaatattttattttttttttgacttgttattttgagagtataaaagtgatcatattttcctctcttaatgagagcttatatgtaattgcctgctgtcagtgaatcttgggtttaaggcccattagaaaaatagcaggctttagtagagtggttttttccagtgagtacttttcagtcaacaggtttattgggaggtggctaaaatgcacatggaggtgagcccttccctgccagacaagcaaagaatcaagctgtatatttaaaacttggctgttaacccaaaggatttctacaggaagtttttttctcctttgatgtttgtagaggggttttttttcccctcccgacaaaatcaatacacagaaaacccaaagctcttaatttgcaaaactgaatggatttgtgaaaatagatacctttttggcagaaatgcaatttggcattaatccct

SEQ ID NO: 249 - DNA, 222 bp, Homo sapiens
acatttgagtacagaactttattaggaaaattataagtgcatatacattttttcattggtatgacttcaaagtagaaattgttgtttctcaaagagttgtttcttatttattttttaaagcacgctgcgtataggaattggccttctcctggaccattttcacattatttgggagatgcaattgaaacaatacaaaatacagtattcatcacatttaacact

SEQ ID NO: 250 - DNA, 462 bp, Homo sapiens
  misc_feature (116)..(116): n can be a, c, g or t
  misc_feature (197)..(197): n can be a, c, g or t
  misc_feature (334)..(334): n can be a, c, g or t
  misc_feature (402)..(402): n can be a, c, g or t
  misc_feature (429)..(429): n can be a, c, g or t
  misc_feature (438)..(438): n can be a, c, g or t
  misc_feature (443)..(443): n can be a, c, g or t
  misc_feature (459)..(459): n can be a, c, g or t
taaggttttataattatttttatttttcttttcttttttttttatggcttggatgacactttattttcagatccaatactagaagttgtttccatgttcacattttccttcctggnttaaaaaaaagagttgtattttttttttttgctttttttaaattatactttaagttttagggtacatgtgcacaacgcagnggttagctacatatgtatacatgtgccatgttggcgtgctgcatccagtaactcgtcatttaacattaggtatatctccaaatgctatccttccccccattgtatttttcatagcttaaaaatcattgacataggantaattccaactaaagtacggtattaaatccctgggggaataaattttgtcttaacaagggtaaggttngtgaaaaggatggttttgtcacagggnaaaaggganatccncccattttaaaacccncct

SEQ ID NO: 251 - DNA, 366 bp, Homo sapiens
tttaatgaattctaggatgaaagaccaaaattaggaaagaacaaagatgcattcatgaattcaagaggagtcataaagaagccaagagtattttaacttacacaataataacataacattaatcaaaagttacagaagacacagctcaggcttgtaggtttacaggcaatagacactgtaatgacagtgtttttttttttgtcagtacttctatatgaattatgtttcatcttttatttgtatatccattcacattctacataatgttcactcttgtaaactcccaacacattccagttggctccattaacttcagggagttctgtagcacctctgattgttaataggatacacaactcccatagg

SEQ ID NO: 252 - DNA, 422 bp, Homo sapiens
tattggatgggcaggagcatcactgtgcataattggtggtgtcatattttgcttttcaatatctgacaacaacaaaacacccagatacacatacaacggggccacatctgtcatgtcttctcggacaaagtatcatggtggagaagattttaaaacaacaaacccttcaaaacagtttgataaaaatgcttatgtctaaaagagctcgctggcaactgcctcttgagtttgttataaaagcgaactgttcacaaaatgatcccatcaaggccctcccataattaacactcaaaactatttttaaaatatgcatttgaagcatctgttgattgtatggatgtaagtgttcttacatagttagttatatactaatcattttctgttgtggctttctataaaaaataaacagtttatttacaaaa

SEQ ID NO: 253 - DNA, 475 bp, Homo sapiens
  misc_feature (124)..(124): n can be a, c, g or t
  misc_feature (451)..(451): n can be a, c, g or t
  misc_feature (469)..(469): n can be a, c, g or t
agttttagtgaaaacaaatttaatatcatcttgtttgaacaaagctttcagaataagtgagcaattaaattcttaaagtagggacagaacaccaacaggctctagactccggaagagctgtaancgacaaatgggcattgttttgcttaacagttttagcttcaatgtaaatatatattattacttagaatattagcatctgaactatataatgactattttatcattttacttgaattaaaaccagaatttctggaacttccaaatagtctttaaagtttttcaatataaacataaactaacccctattcctctctacatatcaaatgtgaaataactgtcacaatatatcagcattttcacagaaagatgtttaaggcttctggcacataaaatgtgtaatttctgtgtgacaatgtcataattatatacagaaaatatttaaaattcntggtagaatttaagttcnaaagaa

SEQ ID NO: 254 - DNA, 362 bp, Homo sapiens
  misc_feature (28)..(28): n can be a, c, g or t
  misc_feature (31)..(31): n can be a, c, g or t
  misc_feature (33)..(33): n can be a, c, g or t
  misc_feature (192)..(192): n can be a, c, g or t
  misc_feature (321)..(321): n can be a, c, g or t
  misc_feature (338)..(338): n can be a, c, g or t
  misc_feature (353)..(353): n can be a, c, g or t
  misc_feature (361)..(361): n can be a, c, g or t
aattgcagaggagctggccccagaaagngtntntttgccaccagcttcagaaaaacatggcagctggggaagtggtttggacatgcacaccaaaccctgggttagagcaagggccaggaaggaatactgggagaatcttcggatagcctcaggcggccatacaacccttcaatgtcaaagccagatggtggnggagtgaccaaaggaacagccgagctgatgcagcagaaagaagccacaactgagcagcagctgaaagagctctttgaaaaacaaaaattcaaatcacagtagcctcgattggaagctattttttgatgnatttcttagggtgtttnggtcacagtttcctnccaaattnc

SEQ ID NO: 255 - DNA, 718 bp, Homo sapiens
tttcctttttctttttttttttctttttttccctgtttttcctcttggccccagcctgagtgggaaatcattcaaccacccatcttttggtccatctgtccatccactatgtcagcaggtccagcccccagcgcctggtcacatgactgtctcccactcttcctgtagcagggcaggtggccgctcagcccagaggcgtcctcgtccaggcctgagcaggagccgttgaggaacccatcgtccttgggagcagccatggcaggtggtgtggtctcgagggtctccagggctggggtccctggcttggcatggcaggcagctgagggtggccgttggtggtggcagtgggcagtaggcgggggctgaggggcaggccgagtcccacacgggggccgacattggtcacacttgtgtgggacaccatggggccgtagctatagctgctgctcccgcttcgtgccctttgctttaaatcccgttccacatttcaacgggtccaagaattcttgaactcaacctgtaactcgccgtttcagaaacagtatattaattcgagaaaaaattccttgaagaggtttaagagcatctcacagtgcatctggacttttcacagagttcctgagaccctcgtgtatggtgtggcccttagacaatgtagtttacgccccaaaggggcattagcaccacagtggattttagcagtttccgggattctgcc

SEQ ID NO: 256 - DNA, 381 bp, Homo sapiens
  misc_feature (308)..(308): n can be a, c, g or t
  misc_feature (357)..(357): n can be a, c, g or t
  misc_feature (373)..(373): n can be a, c, g or t
ttttttttacactgtacataaagtttactttggcattcacagggatgatctggagagagctttttgttatacatgttcttattttattctcttattgttgaaatcctattctgttctcaagtgagtggcaaaagagtagcataaaagagagatatcttggttaaggtatttcttactgagataaaagaataatagaagtatttttattctttaatttttttacattttaattttttcaattttcaggaacttaattttttgaactattgctaacacttaaaagcagggatttttcatagggtttaccnctactgggtaaaggggttatggattacttcccaaaatatttaatatcgnggcccaagggaaaacncggggttt

SEQ ID NO: 257 - DNA, 321 bp, Homo sapiens
tttttgacagtcataaatgcataaagttactttatttttaagtatacatataattttgaaaaatataaatgctaaaatatctcatcttcttcatctcttaattccataaaagtcacaatagaaagcttcataaaactgtaaaatactatgttataggaattttaggatttatattggaaaaagttattagtaatatattgaaatgttttctgttctttatctttttttgttccaccatgttgatctacttcatttaaaataaaaagatgcatcatttctctctccaaagtttaataaagacttaagagaataaaaataaga

SEQ ID NO: 258 - DNA, 141 bp, Homo sapiens
tagcctgatatattttaataattctgttattagtttactgcatcttataacattttcttttgaatcaagtcacagccgtgtgtactttaggctgtggcatcataaacaaatatgtaaagacacagagttaaaatagatgaa

SEQ ID NO: 259 - DNA, 388 bp, Homo sapiens
ttttttctgttaaattttattatagtaacaaagtgactatttttaataataaaagcagagtgcctgtagaagttggatggccctatctcaggccaagtctccttagtgtttcagacctaggctgaccagaatagtcttctagaatgtaacatttatccaccaggtgtcattatttaccaatctgacaagccactgggctgtctccgtgcattcaatggttggaatcaaggctacagaccagaataggagatgaatgaaaatagatttagaaaagggcgttgtggctggaatgcagcttgcagtgtggagggcagggatgggagggtaaagagggctctttgaaagaccagtgtcactttcctgatcaagtttcttaagctgatacttc

SEQ ID NO: 260 - DNA, 435 bp, Homo sapiens
atcatgtttgtatcaagatgtagttaaactcatggcacattttaaacatctgtaagtcagaaggatcacttttggaagaggccaattactggcaaaagtgattcattatcaagacaaaaagtaaatgtactttggaagtgtaaaaatcttaaaaaatccttaaagaaccctttataaaagcaatgcaaagtatttactatacatctgaataatatgcacttcataattgtgcctcaccccacctcctaaaatcttatattgatctgtgttttgggtttgagagccaccttaatgtggaaatgcaagaatcagcaggatcaagtccaagaagaatgaagccagatggttctgtaagacccaatgtgaatagacatatacaacaggaattatttaaactgcttaaccattcccaccaaaatgagtagggtatattta

SEQ ID NO: 261 - DNA, 493 bp, Homo sapiens
aatattttataacttgtccatacagagttttgatgatggagactattttcctgtgtggggcacatgccttggatttgaagagctttcactgctgattagtggagagtgcttattaactgccacagatactgttgacgtggcaatgccgctgaacttcactggaggtcaattgcacagcagaatgttccagaattttcctactgagttgttgctgtcattagcagtagaacctctgactgccaatttccataagtggagcctctccgtgaagaattttacaatgaatgaaaagttaaagaagtttttcaatgtcttaactacaaatacagatggcaagattgagtttatttcaacaatggaaggatataagtatccagtatatggtgtccagtggcatccagagaaagcaccttatgagtggaagaatttggatggcatttcccatgcagctaatgctgtgaaaaccgcattttatttagcagagtttttgtta

SEQ ID NO: 262 - DNA, 425 bp, Homo sapiens
taatcaggtgttctggggcttagataagaaactagctcaacgtaagcatttcccctctgtcaattggctcatcagctacagcaagtatatgcgtgccttggatgaatactatgacaaacacttcacagagttcgttcctctgaggacgaaagctaaggaaattctgcaggaagaagaagacctggcagaaattgtacagcttgtgggaaaggtgagttgttaaattccatggaagatagatctgtgggttacactggggtgtttcaaggacagatagagccttggatattacagattcttgcctagcaaaataaatatttattaaatatttttaattgaaattttctattcattatagtacttagcatggtttttgggtaattgtatgtgagaaagaaacatttgatttacttttatcttgaaag

SEQ ID NO: 263 - DNA, 544 bp, Homo sapiens
  misc_feature (213)..(213): n can be a, c, g or t
  misc_feature (217)..(217): n can be a, c, g or t
  misc_feature (226)..(226): n can be a, c, g or t
  misc_feature (314)..(314): n can be a, c, g or t
  misc_feature (387)..(387): n can be a, c, g or t
  misc_feature (422)..(422): n can be a, c, g or t
  misc_feature (434)..(434): n can be a, c, g or t
  misc_feature (445)..(445): n can be a, c, g or t
  misc_feature (532)..(532): n can be a, c, g or t
ttttaatgtttatttttttgtgtgtgttgcgtgtatcatgtatttatttgttggcaaactattgtttgttgattaaaatagcactgttccagtcagccactactttatgacgtctgaggcacacccctttccgaatttcaaggaccaaggtgacccgacctgtgtatgagagtgccaaatggtgtttggcttttcttaacattcctttttgtntgtntgttttgtnttccttcttaatgaactaaatacgaatagatgcaacttagtttttgtaatactgaaatccgattcaattgtataaacgattataattnctttcatggaagcatgattcttctgattaaaaactgtactccatattttatgctggttgtctgcaagcttgtncgatgttatgttcatgttaatcctatttgtaaaangaagtgttcccnaccttatggtnaaaagagagaaggtaaataacagactgtattcagttattttgccctttattgaggaaccagatgtggtttctttttggttggaatcncattttggaaat

SEQ ID NO: 264 - DNA, 273 bp, Homo sapiens
  misc_feature (17)..(17): n can be a, c, g or t
  misc_feature (23)..(23): n can be a, c, g or t
  misc_feature (49)..(49): n can be a, c, g or t
  misc_feature (249)..(249): n can be a, c, g or t
aggcattcttctatgtnctaggncttcaagaaacctccatacccaaganaaaatagaaagcaaccatgttctactatggtgccaaaaatagttgaacatcgacatcaaaaagattctttctgtctgcttattcacatattctggtttgaattaaaagtgatgaaattatcctaaatacagttggccctctgtatccatgggttccacatccacaaattcaaccaactgtggatggaaaagacttgaaanagatgagagagaataacaatatga

SEQ ID NO: 265 - DNA, 449 bp, Homo sapiens
cttattcaataaactcttttattctagtccacagatttttccattacaataataatgaaaatagcactagtaatttgtaacactgaggcccaaagggaaacccctcctcaaattataaggtaaatgacacaaagttgaacatagggtcagtgttgggcaaaaagcatttaaaatatagataacggggtcaagattttgtgtgtgtgcaaacactgggttttgtttttcaggatgacaccattttagaaagtgcatgattttgaaaactatatgtgtaattgtgacaaaactaaactgtagagaaaagacaaaatcaagcaaaaacaaaaaccaagaaaccaaaaggaagcaaatcaaatacaaggggcggatatgcaaacctccggtcctttggccctggaatggcaagtgagtgggcttcatagaaattctctgtagaaaggaatgtg

SEQ ID NO: 266 - DNA, 279 bp, Homo sapiens
  misc_feature (55)..(55): n can be a, c, g or t
  misc_feature (66)..(66): n can be a, c, g or t
  misc_feature (271)..(271): n can be a, c, g or t
aagagggaaggcttagcatcgtcgtccttgatcagaagggtgatcagcaccgcanaaccccagggncaattggacctacagtggtagcatttagaaaaacatctttacctccaaacaagagggacacaaccaaatcaaagtgattattagagacactttgtcctggagcctgctaaagagcataccccttccttgacctatttagagatactctgtggactttgttcaagaaagaaagcataacagtaatgttcctggttgacttgaagtnaagctgta

SEQ ID NO: 267 - DNA, 386 bp, Homo sapiens
  misc_feature (219)..(219): n can be a, c, g or t
  misc_feature (350)..(350): n can be a, c, g or t
tttttttttggtttgagggggaatgctggagaaaacatcaacattgagttgacatttgttttgctgaagtatagctaccatccactatcatgaatttttgtttcattacaaatgatagaaaagccagattctcaaaataaagtataattctttgtattaaataaatgtttataaatgtttatgaagctcattacattatcttttttaaaaaagtaaaanttttagaacatatgacgcttttcataattaatgcttttgatatagatttgaggaaagagtctccagtttgcagttctgaaaatgtaattttcaaattaaatttcattggcatttgagggtgacaccttccnctataatttcattacccggattgtaaggtttccccc

SEQ ID NO: 268 - DNA, 364 bp, Homo sapiens
  misc_feature (342)..(342): n can be a, c, g or t
atctcagattggttcgttgtggatgctctggctaggctcggcggccttttccaggcttcaggcctgaacaaaacaggctgtttgctgtgaggagctagatgacaccaagacacagacacgtactcttcaccggctccttttgcttctccttcctgcaggacgtgagttatgtctggtcccaaaacccttgagtaaactagctgagccattgcaaatgaaggtacagatggattgaaacataaaattgtagcttttgggtgtccttctgaagggtcagaatatgtaattatttgataaccaagggaagtcaagtcagatgggctaagtaggtaactttcccantatggattcttccgtggtactt

SEQ ID NO: 269 - DNA, 343 bp, Homo sapiens
ttttttttctctttcaacaaatttattcaattcacagtgatatctgttggacagagtcagcaatcctaccagacaaaactcatacacacattgattccagatgagaaacaacagtcccccaaggagcttgagaaatcacctagggcagccaagctggggaagggaagtggctgtgcattgctgtgtgtcctttaaggctctttggtcctggttgatttcctcttagaaggttccaaataaaacttccctttcctattcagtacacaccagtctttctttggtgtttaacctaatgggctgaggaagggaggcagccaggaaattatacccattaaagtgtgtg

SEQ ID NO: 270 - DNA, 493 bp, Homo sapiens
  misc_feature (45)..(45): n can be a, c, g or t
  misc_feature (273)..(273): n can be a, c, g or t
  misc_feature (297)..(297): n can be a, c, g or t
  misc_feature (302)..(302): n can be a, c, g or t
  misc_feature (309)..(309): n can be a, c, g or t
  misc_feature (318)..(318): n can be a, c, g or t
  misc_feature (330)..(330): n can be a, c, g or t
  misc_feature (344)..(344): n can be a, c, g or t
  misc_feature (362)..(362): n can be a, c, g or t
  misc_feature (371)..(371): n can be a, c, g or t
  misc_feature (397)..(397): n can be a, c, g or t
  misc_feature (482)..(482): n can be a, c, g or t
ggcacgagcttgtacctgatgccgatattcaacgctttcggaatnagtttgaaaaaatctgcagaaaggaggtgaaccattaggattaacagtaatgagagatgtgaccatttcgaaatccgaatatgctccaagtgagaagatgatcacgaaggtccaggatttccaggaagataaggagctcttcagatactgcactctccccgagattctgaaatatgtggagttcttcactggacctaatattatggccatgcacacaatgttgataancaaacctccagattctggcaagangacgntcccgtnaccccctgnaccaggacctgnactatttccccttnaggcccagcgatctcatngtttgcgcntggacggcgatgggagcacatcagcnggaacaacggctgtctggttgtgctcccaggcaaacacaagggctccctgaagccccacgattaccccaagttggaggggggganttaacaaaatt

SEQ ID NO: 271 - DNA, 396 bp, Homo sapiens
  misc_feature (117)..(117): n can be a, c, g or t
cttctgtctttattcccagaatgcttggttcaccctacaatataatcgctgcttttcttggttgcttctcttcttcatcttcccaaaataaaaagtatcctaggttcagttcttggncctcttatctccttccctctgaagtgtttctgttgaaattgtccttcagtctcctgtcatcaactatactctagtgtgggataattcaaaattctctctagcctcaatcctcatactgacctctactgccacattttcaaatgccctaataggacactattggggaggatacccttcttgggcccgaagggaaaacaatggctttctcccgtggttgggggaaggtcaaggcccccaaatggtgggaaccatcatcaaggagggataggaggggtgggc

SEQ ID NO: 272 - DNA, 386 bp, Homo sapiens
gtgatctctcacttttacgacttttatttaccaaaactgggtgagcgaagatttaattttatcaacgccaatagttcctctttcctgttttcaaatcagttcaacctacagctttactattctcccattctattcgtagactatatgctagtttactgtatttgatttctattattgatttatatatgttaacagtagccaagccttatcttctcaaagacttaggaggtttacccttctaaagtgctcccaacaagagatacaggtgggtaggagacaggtagacaagcaggtagggtcatagagctggacacgaactttgcctccccataagccaatggaggacaggcacttgggaatgtctccacccatttctgaatccgttg

SEQ ID NO: 273 - DNA, 450 bp, Homo sapiens
  misc_feature (17)..(17): n can be a, c, g or t
  misc_feature (125)..(125): n can be a, c, g or t
  misc_feature (368)..(368): n can be a, c, g or t
  misc_feature (375)..(375): n can be a, c, g or t
  misc_feature (438)..(438): n can be a, c, g or t
  misc_feature (448)..(448): n can be a, c, g or t
ttttttttttttttggncattaccagggtactatttattgttccttgaagctttaatatagttaagtatgaaatgcagaatcaagaagagatatgtacccacccaccctggcaatttacaaagantcaagaggctgattgacagttgaacgattcttcgcccttctatagtaccttttacagaaagccttataagtgtgttatcaaaaccacctgtcaccccttgttaaaaatgctctgccttttaaaagttgtaaattaaaacttaacgctgttaataaaatcattgcctcatttttctttctaactagattgaaatttcaggcccaaaattctctagttgtcttcagagctccctctgggcagggnaagaagncctgtcctcatcccgcatagggagtaggggagcaattcctttggacccccagaccagttgttnttggaaattnca

SEQ ID NO: 274 - DNA, 218 bp, Homo sapiens
  misc_feature (72)..(72): n can be a, c, g or t
  misc_feature (92)..(92): n can be a, c, g or t
  misc_feature (151)..(151): n can be a, c, g or t
  misc_feature (159)..(159): n can be a, c, g or t
  misc_feature (170)..(170): n can be a, c, g or t
  misc_feature (208)..(208): n can be a, c, g or t
  misc_feature (343)..(343): n can be a, c, g or t
tttttttttttttttttttttttttttgctggttttactagtttggaagcagttttaatgaagatggaaatntttatcaactcaacacaggnacccccaaaatacaaatcaaaatatcatcttcagctgcatagcaaatatgatttaagantttaacancattatttgancacaagcgtaaatatgtcaccataaataaatgtaaatncattgtacaa

SEQ ID NO: 275 - DNA, 357 bp, Homo sapiens
  misc_feature (343)..(343): n is a, c, g, or t
ttaaccctaaggctcagggaaataccctatgttattgtgctccctggattcctgcaactcattttccttccactctggagcagggtgaggggaatgttatgggtaacagacatgcaggcatggctctacccatttctttgcacaagtatggggcccatgtggtagtccccatacccctccagttcctatatttttgtcttcttcctttcccctctttgccattcctaccttgcatttttcctgtcagtgccttagccaaggaaggagataaggatgctcttcttgctttttatatctgcacattcatacctcttccaaagaccagcttttccccagccagggnccctcagccttccc

SEQ ID NO: 276 - DNA, 329 bp, Homo sapiens
tttttcaagtcaaaactgttttattgtcgtttacatatttaatagaaaaaggaatgtagcaaacgctcagggttgtatgaaaaaaaaatccaggtttgtgcaggttgctctgtttacatctgggagcagggctgtccccacatcaggcacagcagctgcacttctccgacgcccctttgcagacgcagccctgggcacacttggcacagcccatggggcagcaggagcagcagctcttcttgcaggaggttcatttgcactctttgcacttgcaggagctggcacaggagcaggagcccccagtggcgcaggagcagttggggtccatt

SEQ ID NO: 277 - DNA, 370 bp, Homo sapiens
  misc_feature (33)..(34): n can be a, c, g or t
  misc_feature (36)..(36): n can be a, c, g or t
  misc_feature (38)..(38): n can be a, c, g or t
  misc_feature (105)..(105): n can be a, c, g or t
  misc_feature (354)..(354): n can be a, c, g or t
tgtctggaggggctgataggacccccttccggnncncntttcaccccaccaggcttgggaggaagtgcctgcagccaggtcctgaaccataaccacccctggganacacatcattcccagcctcaggccctgctggaattggggctgccttatatgtgtgtttaccccttcctggcctggggaaggaggcggggagggctcctttctacctccagtgccctgagcctccagtccgtctccccctgcatgccccatgtgggaggtgctgagctccaaaccagcatcacaccaactctgacacatggatgtacctatcttggtgatgggtgggggccaagaattgagcatgacatnttccccagcagccacc

SEQ ID NO: 278 - DNA, 474 bp, Homo sapiens
  misc_feature (3)..(3): n can be a, c, g or t
  misc_feature (10)..(10): n can be a, c, g or t
  misc_feature (39)..(39): n can be a, c, g or t
  misc_feature (416)..(416): n can be a, c, g or t
  misc_feature (424)..(424): n can be a, c, g or t
aangataagnaattattttatttccttggcctgatgganttgacttcattatacaagaacttgcagctgacagaactgacacacacatttcccccaagagaaagaacccttttcattagcagagatgaattgaaatgtcatgtctgagtgcaattcctgctccccactcccaccccacaaaatcccaaaagtgaaaataaatcaataaaatccccatgatttactaaaagtcatccctccaaacctttctaactagcagctgcagtgggatgataaccaaggaggggaagcagctggccatcatgtagcattcctgtgcatgtgagcctgaagggacagcagcatggggagcaagaatcctgaatgagagtaggtatataattaccttacttcatacttgccccctccctacatangacacctntgtcctgatacatgggaaaatactagagggagatgcttaggagtgggttt

SEQ ID NO: 279 - DNA, 378 bp, Homo sapiens
tttttttttttcagtataaattatttttaattttagaaactgagattgaagtacagtttttagtttaaaatattaaaaatgaaaaaacctttaacattattaaagatgtgttgttacaaagttcctagatatatacatgtacaaaacaaatagatattactatctgacacctcaacccatgacttaccctaaatctcctgatatgaacaattaatctactgggaggcttttcccaataagtttcaaatttcttgcacaaagatttgctgccattcatattctgtggcatgggatgagggacatttaatcacaggactatttcaacttaatataacctaggcataaaataaatccaatggaaacactacatttataggg

SEQ ID NO: 280 - DNA, 429 bp, Homo sapiens
  misc_feature (371)..(371): n can be a, c, g or t
  misc_feature (384)..(384): n can be a, c, g or t
  misc_feature (402)..(402): n can be a, c, g or t
  misc_feature (416)..(416): n can be a, c, g or t
  misc_feature (421)..(421): n can be a, c, g or t
acttttattgtcatccagcacctgtgatagtttcatgtctctctaaaggagacaggaaattggagcattgtgggcccttttaaaagaaaagaggagtaggtaggcacacccaggtgcttctaaaacaaccaagcccaaacctgacatgctcctccccacagtcaccttcattgtcccctttaaaagtctggaacagtatgtagcaaaacaaataaattacttttcatttcaaaagtaagtccaaaggttgaagctgcctaggccaggggttctgggacagggtgcctccaaaggaagtgaggctttccttttcaacttccttaggctctagccagtaggaccaggaaacccctgcttttccacatcagggnttccaggatgggngttttaggttaggacttngggggatcccgttngcttngggggatc

SEQ ID NO: 281 - DNA, 437 bp, Homo sapiens
  misc_feature (323)..(323): n can be a, c, g or t
  misc_feature (379)..(379): n can be a, c, g or t
  misc_feature (392)..(392): n can be a, c, g or t
  misc_feature (406)..(406): n can be a, c, g or t
  misc_feature (428)..(428): n can be a, c, g or t
tcttggcttaccagtgctgctgactttgccgtgagcattttactcctcattctcccatcctggttcccctcagtatcctccctaaaaggtggaacagcactgagctgacctttccccccaaaccccagggcctcacttctgcctccgaaggccctctgctgccccagtaagggacagtagggctgcacgctgcctctcagctgcctgcacaggtgtggccagagagcaggactggagggttccttctggtaccttcttgaagggctcccaatgccaagctcctttccttcccaccttcacatcactgaggatgagaagaggtntggaatgagtggggaacagctggggcagcggggccccgagtggctgtgtctgggtnaaacagagcactngaaccatggcactntcaaggaacccaaagaagcctnaagctttcc

SEQ ID NO: 282 - DNA, 310 bp, Homo sapiens
ttttatcaaatgaatactttattagagacataacacgtataaaataaatttcttttcatcatggagttaccagattttaaaaccaaccaacactttctcatttttacagctaagacatgttaaattcttaaatgccataatttttgttcaactgctttgtcattcaactcacaagtctagaatgtgattaagctacaaatctaagtattcacagatgtgtcttaggcttggtttgtaacaatctagaagcaatctgtttacaaaagtgccaccaaagcattttaaagaaaccaatttaatgccaccaaac

SEQ ID NO: 283 - DNA, 533 bp, Homo sapiens
  misc_feature (178)..(178): n can be a, c, g or t
  misc_feature (180)..(180): n can be a, c, g or t
  misc_feature (360)..(360): n can be a, c, g or t
  misc_feature (396)..(396): n can be a, c, g or t
  misc_feature (417)..(417): n can be a, c, g or t
  misc_feature (433)..(433): n can be a, c, g or t
  misc_feature (441)..(441): n can be a, c, g or t
  misc_feature (456)..(456): n can be a, c, g or t
  misc_feature (465)..(465): n can be a, c, g or t
  misc_feature (480)..(480): n can be a, c, g or t
  misc_feature (488)..(488): n can be a, c, g or t
  misc_feature (493)..(493): n can be a, c, g or t
  misc_feature (499)..(499): n can be a, c, g or t
  misc_feature (508)..(508): n can be a, c, g or t
  misc_feature (528)..(528): n can be a, c, g or t
ttccactttcacattaaaatgaataactatatttttaaccctctattcataacacacacaaaaaggttatattaggcttttctacagagagtacagaaatagaaaagtcactactaaatacaaataacattgacagttaccaagaaagaagaatttgcagctgtcactgtgccgtagntntgatgaatgcaggttttagtttggccatctgctccagtgaggaaggacggatgccattatctttgggaactgtatcttttcctattaaaaaaatgaatttttttaactctatggggaccacaagccttatatatcttctccacagggaatatgctttaaaaattaccaaaaccaaatggnaatataaacccttccctattcactggaggggaaggnggttttataattatcctattntccaaattttaacctnagggcttnaaggccatggggggnatcctcctnatggctttcctaaanggggggcnccccnttttcntaggggccntccttcccggccgggccggnttctg

SEQ ID NO: 284 - DNA, 339 bp, Homo sapiens
tttttcagaatattcaactttattttccattgacaaacacgacataaataacacacatttattaaatacacagactagccatgacttgaatgccagcaaaagtctaacgtacttttcatacgctcttttattttttgtctccacagtattgaagaccagcctttaaaacatactagaagatatatttaaatacactgacgataactacccataaaactttacatagaggtgataaaagagacttttccatttaatcaagtatatagagatggatgctgaggaggagaggtgaagaacactatgcttttgatactgatctttacaatatggattaaagtg

SEQ ID NO: 285 - DNA, 498 bp, Homo sapiens
ttttctgcgttctcaactttattcaacattagacttaccttatttctttcagtgtgtagggacaagatgtactgctgtgtgtgtgtgtgtgtgtgtgtgtgtgtgtgtgtgtgtgtgtgtgtctataccttcctatccattggcaagttaacctccatctggttgatttggccatgctatgctttcttcccattcccctgctgtctattctaagcccccagactcaagcctctagactcttggatgaaacagtgagaagaaaacattttctgacttacccttttggaatctcctccattattacccaggctttgctttaagttgcactttaaatcacactgtcctattaatgcgatctggcatcttctcccacaagccccctacagggaacaactaccccgtaccttaactctaaatggttctttagactatagtctgtctcctctgacctgaaatcctcttttaggcaataggccgagctttagaagcagccaggtt

SEQ ID NO: 286 - DNA, 488 bp, Homo sapiens
  misc_feature (5)..(5): n can be a, c, g or t
  misc_feature (7)..(7): n can be a, c, g or t
  misc_feature (9)..(9): n can be a, c, g or t
  misc_feature (49)..(49): n can be a, c, g or t
  misc_feature (478)..(478): n can be a, c, g or t
tttcnancnctcggtaacctctgccaaagtggctgtgaatggcgttcantgcattaccagcagactggagagggagatcacgcagtcctgctacttcctgggatgttaggaagtggagagactgattttggacctcagctcaagaacctcaataagaagctcttcacggtggtcgcctgggatcctcgaggctatggacattccaggcccccagatcgcgatttcccagcagacttttttgaaagggatgcaaaagatgctgttgatttgatgaaggcgctgaagtttaagaaggtttctctgctggggtggagtgatgggggcataaccgcactcattgctgctgcaaaatatccatcttacatccacaagatgggtgatctggggcgccaacgcttacgtcacttgacgaagacagcatgatatattgagggcttccgagatgttttccaaatgggagtgagagaacaaggaagcntttagaagtt

SEQ ID NO: 287 - DNA, 489 bp, Homo sapiens
atgatgtcgctttcggcagcctcgtacgccagtgagatggcagggaccatgtcagtgcccagatcgatgcagaggatggtgattgtgcccaggggagccgggatttttggccatgatgaacagcaggaagggcgtgatctccgggatattgctggtcagggtgtaggcaatggacttctttaggttgtcgaagatcaggcggccctcctccacccctgtgacgatggaggcaaagttgtcgtccagcaggatcatgtcagctgcctgcttggagacgtcagagccagcgatgctcatggcaccccaatgtcggccttcttcagagcgggggagtcgttcaatcatccccggtcacagccacaattgcaccctgtctctgacagccctccacaatgatgagcttctgctggggggatgtgcgcgcgagacgatctcggtgtgattctgcaggatctcgtcgatttgctcggaggtgaagtccttgaggtc

SEQ ID NO: 288 - DNA, 539 bp, Homo sapiens
aattcggaagaggaaggtgaagaagggcgtccaaaggatgaccgccacctccgtggctgtggctaccttcccggctgcccgggctccaatggtttccacaacaacgacaccttccacttcctgaaatgctgcaacaccaccaaatgcaacgagggcccaatcctggagcttgaaaatctgccgcagaatggccgccagtgttacagctgcaaggggaacagcacccatggatgctcctctgaagagactttcctcattgactgccgaggccccatgaatcaatgtctggtagccaccggactcacgaaccgaaaaaccaaagctatatggtaagaggctgtgcaaccgcctcaatgtgccaacatgcccacctgggtgacgccttcagcatgaaccacattgatgtctcctgctgtactaaaagtggctgtaaccacccagacctggatgtccagtaccgcagtggggctgctcctcagcctggccctgccatctcagcctcaccatcaccctgctaatgactgccagactgtggggag

SEQ ID NO: 289 - DNA, 437 bp, Homo sapiens
gtatattaaacagtttatttcagtaacattgtaaggcaacaattaatcctcagtaagtcagcaaaccagtgacaagaaattgacaaacactccttctacagcttcctgagacagcaggctggcttgtggccccctgggtggtaacatcttaaggaatcctatcatgtttgtttatatatgctaaactgtaaaaacaaacacttcatgcgacaatcattcttaggtcaaacacaagaacgaactattttgaaatcaattcctcacactttttccctgaatatgcagtactgtactactaacatctaattctgtagaaaataatgcatttgttagtgactttgttagagcttgaaaagacccttttagaaattatttaaatgatcactctttaaaaattttttttaatctcagaatctactaatgtgacagacaaacgg

SEQ ID NO: 290 - DNA, 430 bp, Homo sapiens
  misc_feature (409)..(409): n can be a, c, g or t
ttaataactgatatatatctttttattatgcacagataaaagatttaaaactgtggttatcaaaactatacatctaagcatcttcacaaaatagctgacacactgaacagagaaaagaatacaacaggggtgttcaaactggccacagggattttaagggtactcgttttaccctcatagatgatgaaaaccagcaacaaaatcaggctcattcaggaaaaaccagaagagagaagtattgtatttggaaactgataatagtcctttttagaaaaacatctgtcagtttcatgaacaacccccagataaaacaaacatgaaaaaaatcacataggacttcacccaacaaaatgtgctctgttaacacaaccagcagtacaatcattcattcaaaccatgaggtagttanagtaccaaaagactgggcacg

SEQ ID NO: 291 - DNA, 387 bp, Homo sapiens
tggtgctcatcttcgctcgtttaatttcagtcagatattaaacatttacaatttttttatataacaaaacaagaacatgcaaagttacaaatatagaaaatataaagtacatgcatatttcaaagacctgttaatggtgtccactttggattcttacatgaaacgattcagtgcacattgtaagcctaaggaccacgcaaaagggtttccacatattaagtattcagtaccttacaaaagttaatgcattagacacttcagatgttaactgctctaaacaaaactcctaagtctgtcctatgcaatatatattttatatacatatatatttttacatagaatactcacaaagtgcaagccaataataacattgcagaaaaaaaaaaa

SEQ ID NO: 292 - DNA, 478 bp, Homo sapiens
  misc_feature (409)..(409): n can be a, c, g or t
  misc_feature (427)..(427): n can be a, c, g or t
  misc_feature (443)..(443): n can be a, c, g or t
  misc_feature (452)..(452): n can be a, c, g or t
  misc_feature (458)..(458): n can be a, c, g or t
  misc_feature (467)..(467): n can be a, c, g or t
  misc_feature (472)..(472): n can be a, c, g or t
gataataagcactgaacaattttattaagttctttgccaaaatgcaaacatatgaaatgaggttgtgtacaatagaccaaaggctacctagagaccaacagtcatataaaaataatttaaggcaagctttattgatttattttaaataaggtaagtgaaatatgggctcagaattaaataagattttcaagaaagttcttgtagctgtaaaataggagaatatgaatgtcaaaattttgactgtttctgtgccaaacagaaagtttcacaaatgctttccaaactgcaataaaaagaactttaataataccattaagtctacaaagttactgtcaagttgacagtattcaaatactacaatattttctaaatgtaaattttgtaacatcctgaatactttctaagcccncttttccggtccattacnaaaataaaattccccngaaatttcnggctancattaatcnttagnggatcc

SEQ ID NO: 293 - DNA, 410 bp, Homo sapiens
tattgccaaatactgaaaggagactaagcaaggaagctggatatgaaatgtctaccttcttgacttacgggtcatgttgtggtccttcctatttccaccttaaaattgacaaggcctcgctcaaatttgtgctaccaatgatacagagtttatagcaaattttctaagggaagtatctgtggaaattttctcatgattcatgaaaaatgttattagaagtacaagtatcctggaatcagtcatcaggtcctccctctaagcccactgggaacaaactgaggtgtgtttatgaaagattccttactgttagtggtaagcaggctgtagaaagcccatcatccttagaagaagattcttctactaagcaatgttacatgatccaacctttaagacctctatctgtgagagga

SEQ ID NO: 294 - DNA, 293 bp, Homo sapiens
  misc_feature (48)..(48): n can be a, c, g or t
  misc_feature (217)..(217): n can be a, c, g or t
  misc_feature (240)..(240): n can be a, c, g or t
  misc_feature (249)..(249): n can be a, c, g or t
  misc_feature (266)..(266): n can be a, c, g or t
  misc_feature (274)..(274): n can be a, c, g or t
  misc_feature (277)..(277): n can be a, c, g or t
tttttttttttttttttttttttttttagaattctgaattttattagngaatatatctaaaatacaatatttattaagttatgatatattgtctgaatggaaatatactctgtatcacaactctaattataacaatttttacagataatacttcatttatatctctgtaattcaaaagtcattaaattacaacagaattcatatttaagataacttngctataaatatataataattttnaaagttttnctttaatataacatctngaaatcangancatttatttttcctgg

SEQ ID NO: 295 - DNA, 618 bp, Homo sapiens
  misc_feature (562)..(562): n can be a, c, g or t
  misc_feature (568)..(568): n can be a, c, g or t
  misc_feature (588)..(588): n can be a, c, g or t
  misc_feature (605)..(605): n can be a, c, g or t
  misc_feature (610)..(610): n can be a, c, g or t
  misc_feature (616)..(616): n is a, c, g, or t
  misc_feature (618)..(618): n can be a, c, g or t
ttttaaatttttaaataaattttttattacaatgacaggaagactctggatacaaacacatttgctaatataatcactccactggttacctaggcctagacgtacaaaaggacacccatatctcatcaggagaaagacaattttgagtttctgggtgtagtaccaagtggttatgatcaccacgtacgtgtcatatccagttaactgtgtggcaatttgctatttcaagtcctctcataacagaaattactgaaatatgtggaacaccagtcaatataaagaattcatttttaaacagactagtgaatttgtgtcataaacacacttgcgtatggatattaggagagcattgcttgaatatctctaaaactatttttaggaattaaaagctttcatagttaatggtatgatattggccttcagaattcatattgataaaagcaaaccttagtcatttaacaggaatgtttaaattttagagattctaacatgcgatgccgaaaaatcctaacatttccacttagtaatgtcaggggtgtgccagttccaatttcccatagcnagtacntccggaaaatatttatccgnggttccatatgggttcnttagnccggtnaa

SEQ ID NO: 296 - DNA, 669 bp, Homo sapiens
ttttttttttttatcttatcagcagaaaagttttattccttttgaggacaaacaattaaaccacatccaaggtcttaacttacagacagaaaccaaagtagccatttaaagcgttagatatcggatacaagacatacactggggagaatgcttcaccatctgaagctcacaccacaatggcccagtggacagctgtgcactctgcttgtgcttaagtgcctgggtgtggctgatgggaaggcgtgtctgcagaacagaagaacagctgtgtttcacaagtactgaagcattttagactgcatgtgggggtatatattttcatgttgaagggaagaggggaaatcagccaagtccctccccacagagcattaagctgccctgcagaagagccacggcagagaagcggacttctccctgctcaggcccggtaaattcctgcagaccttggaagcgtcctttcagcaggtgtcctctgaactggggccatggttcacccgaaaaggcattcgtccatcaaggtcatagagggtggccacccacttggttaacaggataaaaatggagattctccttgtcagctaaccggaattggctttctttggccacggtataaggggcgccttaaggccccaatttttaaaaaatttgccctgttctgagggaattttc

SEQ ID NO: 297 - DNA, 365 bp, Homo sapiens
  misc_feature (344)..(344): n can be a, c, g or t
tttttaattttcccaagattaaatgattattaaaaaagcgcgccacactgtatagaaatcaacattctctcccataattctgtgcatctgggactacagaaatgtcactgtccctgccccacatcttcaaattaacattttcaggtcacaacaataagtcttcccaaagggaccttccggaaaaataagctatttcctcggctcatattcccctctttttgtagcatgcaccaacagtctatccaagacgtatatattggggagtaaggagggcatccaccagcaaagaccacagttgttgacagccataagatttgggagacaagcacaaaggggataggtcnaacatactcgcaaaaaaacct

SEQ ID NO: 298 - DNA, 396 bp, Homo sapiens
cccagccaggctttcgagtatatcctgtacaacaaggggatcatgggtgaagacacctacccctaccagggcaaggatggttattgcaagttccaacctggaaaggccatcggctttgtcaaggatgtagccaacatcacaatctatgacgaggaagcgatggtggaggctgtggccctctacaaccctgtgagctttgcctttgaggtgactcaggacttcatgatgtatagaacgggcatctactccagtacttcctgccataaaactccagataaagtaaaccatgcagtactggctgttgggtatggagaaaaaaatgggatcccttactggatcgtgaaaaactcttggggtccccagtgggatatgaacgggtacttcctcatcgagcgc

SEQ ID NO: 299 - DNA, 428 bp, Homo sapiens
  misc_feature (35)..(35): n can be a, c, g or t
  misc_feature (321)..(321): n can be a, c, g or t
ttagcaacacttttcttgtttgtaaacgcgagtgnccagaaagtgtgaatgcggagtaggaatatttttcgtgttctcttttatctgcttgccttttttagagagtagcagtggttcctatttcggaaaaggacgttctaattcaaagctctctcccaatatatttacacgaatacgcatttagaaagggaggcagcttttgaggttgcaatcctactgagaaggatggaagaaggagccaggcaccgaaacaacaccgaaaagaaacacccaggtgggggcgagtcggacgccagccccgaggctggtttccggaggggngcggagtagccctgaagaaagagatcggattggtcagtgcctgtggtatcatcgtagggaacatcatcggctctgggaatctttgtctcgccaaagggagtgctgga

SEQ ID NO: 300 - DNA, 278 bp, Homo sapiens
cctgtgcttatactacaaggatctcatatgaatgcagtcctgattgttcgacacagcaagaaaattcactttcacagtcaacaagtcatcttactcagtagaacacaaagtaaatggtttataactccaatatttgcaaggaaaatacagtacaaattactaaaaaatactaaaatatagaattgtgttcaggcatctccactacatcaatcgcagcagtaacctgaaatttgagacttttaataaaaagttcttaaatataaattataatggcaaat

SEQ ID NO: 301 - DNA, 456 bp, Homo sapiens
tttatggttctcagataccactttaatcaggtttttcactatacagtgatgggggtagaagatggtgactgttttcaagcaaattcacgaggcacatgttcgtccctgccccaaagtgaacagtctgggcttcccagaacagaaaagtgctttccttcctgggggaatcccattcctgagctgacaagacagatttcagtaagaatgagcacaaaggatagggcaaaatagtgaagggagccaggtgcatatttgaattctttccagtgcagactggaactagacatgcaggtatccctcctaaaggcaacgcccaaatcccagccattcccactagaggccaaaccgcctgcccacagagattgacagccaatgttcatctcataactctcctcccagcagtgcaccagtaaactcagatgcctgagtgcttgtggccaccacacaacagatgcg

SEQ ID NO: 302 - DNA, 529 bp, Homo sapiens
  misc_feature (529)..(529): n can be a, c, g or t
aggtttgaggggggatgctgtcatgaaaaggaactttcgcttttcaggttatgtatgtatagttttctgaactggtatcacaaccacatgctgcttctgtgtaacactgatttggtcaaaaagccctgttcctcctgagaatcaccaaattgcttcccaaagatgctatatccttcacaccaaacttaaatcactggctactgagaatatgcagtctttgcgcacaattgcgtcttctgtctgcccctcccgcaggtcccagacacaatttcttcatggcttcttcagcctttccaccctcagcctctgtctccaaattgtaacccattttacatgaccacacagggacacatcatcattctttatggaagaaggtgagatagaaacaaataatgaggtgttgattgattgaatttcctgaatcctagaccttaggatcttgaaatggccccttttcctgctacgatagcccatccaatgccttccggctccaccggctcctctggagagctcaaactcatgaataacn

SEQ ID NO: 303 - DNA, 264 bp, Homo sapiens
  misc_feature (19)..(19): n can be a, c, g or t
  misc_feature (49)..(49): n can be a, c, g or t
  misc_feature (131)..(131): n can be a, c, g or t
  misc_feature (176)..(176): n can be a, c, g or t
  misc_feature (235)..(235): n can be a, c, g or t
  misc_feature (245)..(245): n can be a, c, g or t
  misc_feature (254)..(254): n can be a, c, g or t
  misc_feature (261)..(261): n can be a, c, g or t
catatatgaaatataaaancaaattaacaaagcaatatatatatatatntgcaagtccacaggacttcagagaaaaaaaggttctgtatgtgaaattattcatatggcactgtgttcatgttttgtatatncaagtacaaaagaaactatgtatagtggttatgcgtgggtacagnagatgaataataatgaaaaactgtgattttttgactatcacatacattgtgtttaaaanccggtaaatntaatgactnttactgntta

SEQ ID NO: 304 - DNA, 449 bp, Homo sapiens
  misc_feature (212)..(212): n can be a, c, g or t
aaatagctaccgtttattgggcactgcatggtaccaggcactattaagcactttaaagacatgacttcatttcatcttcaccacaactccatgaggtaggtgttatgatccccacattacagatgaggaaaccgaggttctgggcactgatttcatttgtttgaagtcacacagcttgtgagtggtgaggctggaatttgagcccagatggntgaacccaaggcagagcttgcaaagttgtgacatcagtacagtgtgttattgtacccgtccaggggccacagccctcaccttcctttcaaaccccattctcaggatagggtctgaaactcctgcctgcagaaaaggcttgtgtgtctccctccctggtggacctgcatttcgctttgttctatcagaggaatgaagctgaaatcgtgcaacgtcaggcagttgccctggctgggaat

SEQ ID NO: 305 - DNA, 548 bp, Homo sapiens
  misc_feature (543)..(543): n can be a, c, g or t
tttttttttctccacctaaaatttatttgaaaataaattatggcaggaattcacctattaagacaatggtataacttgtcacaacttcatcttagaaaatcggatttaattttcatagctattgaagttagaggctttattccttttttatttttttttatgtttttatttttttttaagacaaggtcttactctgttgcccaggttggagtgcagtgatgcaattacagctcactgcagctttgaattgggctcaagtgatcctcccacctcagcttcctgagcagctgggaccacagatgtgtgccacttcgcctggctaattttgaaaaactcttttttgtagagccggagtctccctatattgcacaagctggtcttgaactcctgggctcaggcaattctcccacctcagcctcccaaagtgctgagattatagctgtgagccaccgtgcccagcctgaagctagaggctgttttcaatatgtcattatctcatttgggtaggataagattgaagggagggtagaagttcaaggcggngagtg

SEQ ID NO: 306 - DNA, 363 bp, Homo sapiens
  misc_feature (52)..(52): n can be a, c, g or t
  misc_feature (158)..(158): n can be a, c, g or t
  misc_feature (166)..(166): n can be a, c, g or t
  misc_feature (219)..(219): n can be a, c, g or t
  misc_feature (234)..(234): n can be a, c, g or t
  misc_feature (270)..(270): n can be a, c, g or t
  misc_feature (306)..(306): n can be a, c, g or t
  misc_feature (336)..(336): n can be a, c, g or t
  misc_feature (348)..(348): n can be a, c, g or t
ctgtgacgctgctggtggggtcagaatgtcatacccaggctatcccccaacnggctacccacctttccctggatatcctcctgcaggtcaggagtcatcttttcccccttctggtcagtatccttatcctagtggctttcctccaatgggaggaggtncctacccncaagtgccaagtagtggctacccaggagctggaggctaccctgtcgcctggangttatccagcccctngaggctatcctggtgccccacagccagggcgagctncatcctatcccggagttcctccaggacaaggatttngagtcccaccaggtcgagcaggcttttctnggtatccacagncaccttcacagtctt

SEQ ID NO: 307 - DNA, 463 bp, Homo sapiens
  misc_feature (193)..(193): n can be a, c, g or t
  misc_feature (230)..(230): n can be a, c, g or t
  misc_feature (345)..(345): n can be a, c, g or t
  misc_feature (396)..(396): n can be a, c, g or t
  misc_feature (413)..(413): n can be a, c, g or t
  misc_feature (433)..(433): n can be a, c, g or t
  misc_feature (450)..(450): n can be a, c, g or t
  misc_feature (458)..(458): n can be a, c, g or t
ttttttttcttgatcaacatttttattttatttttttaggtgaagtagaacacaatagaatggctcaaaaatatcagaatgcactacgcacatcacgagtaaatactgtttggtaaaacttgtttcagttaaatatgtacgtgtccgtgcatgtcatgattaaatatccttcttaccacagtcaccctaaagnaaccaaagcttagggactagggacacaaccatgcagnaaagagcagggagaccagacactctggggttgaggatgatgaatttaatgccgcagccggacacccacatttcacactttgggcttcctttcagacaacttgatctttgggggantagaatttgttacaggggttcaaacaccacataggaaggcacgtggggccngccacacacagcattcntttttaggtgaggagggggncaggttacccttgtctncatggttncaagg

SEQ ID NO: 308 - DNA, 428 bp, Homo sapiens
tttcaaagccgcgcaatcatctgcattttatttgcacctcatttgcaagttgttaatttgcaactctgctccttccactccaggttccttctctcccatcacccctcagattccccagtggcccgggaaaaaatatcttggtctttgccaaggtagactcagccttgtcagcaggcctgtcctgtgttctcaggggaggcctttacccaaggccacaacaacagcagaaatcccgagtaagacgccaccttgacggcagggaaggctggatcttttcacagggcagaactgatttgatgaggtgaacagtaaggtgagcagaggtgggaaaggccagtgggtgaatgcgggaacagcaccaggagctagagcccaactctggcctgtgggctgtctcccggtcctcagaggcgggacggggttcctcc

SEQ ID NO: 309 - DNA, 278 bp, Homo sapiens
  misc_feature (1)..(1): n can be a, c, g or t
  misc_feature (95)..(95): n can be a, c, g or t
  misc_feature (97)..(98): n can be a, c, g or t
  misc_feature (101)..(101): n can be a, c, g or t
  misc_feature (110)..(110): n can be a, c, g or t
  misc_feature (112)..(112): n can be a, c, g or t
  misc_feature (132)..(132): n can be a, c, g or t
  misc_feature (134)..(134): n can be a, c, g or t
  misc_feature (136)..(136): n can be a, c, g or t
  misc_feature (147)..(147): n can be a, c, g or t
  misc_feature (162)..(162): n can be a, c, g or t
  misc_feature (229)..(229): n can be a, c, g or t
  misc_feature (244)..(244): n can be a, c, g or t
ntgaaacattttattaatccactcatcagttgatggacatttgggatgtttgggcttactttacaggtgtaatcatgtaagcatattctttgccngnnccntcccaccgntnaaggaatagcagtagcaagncnangggcaagcccntaaaacagccagcanctggcacacagacaaggaaaagcacctctggtttttaggttaagccaatgaagagtgggggccgagntttagtatccacctngttcaaaacccctaacactttccaagcttgtgtt

SEQ ID NO: 310 - DNA, 413 bp, Homo sapiens
tttttgcagcagagaaggaagtttaatcataaggctgccgaataaggagacagggggaaacctcaaatctgcctgtctgagccgtttaggtctaggtattttaagggagttggagtgaccgaggtgggggatcactggttgaagaatacaggatggtgagatgaagaaactgcattttcatgctgattcagttcctcttggggagaggcgggggggcggtcttcaaactggttggcaatagctcttttgctgtgtcactgaaagtagacccgcagagctgcggcttctgctgccatttcctcctctgatctccaagaggcaggaaagtcctccttgtcatgtttctggagctcctcatagatgctgtcattcctgtgaaagtctccagccttcctgggaagaacatggacgtg

SEQ ID NO: 311 - DNA, 461 bp, Homo sapiens
tttttttttttttcagatcaaattatcctttattaaaatgaagcacagtcaagtataggaaaaaaataaaggtaacttcatctctcacatacaaacgtacacaaaaaaaatcaaagacaagtagtatttgccctgttaaagtatgactttctgcatgtttgggggggcactgttaagaggtaatatttcctaaaagatttaagattttttacaaaaaaccccaatcacactacagcttaaaacagaaatatgtcacctgttccacccaccaaaaacctagacatctgtccctatttctccagtttcaagttgcagtaaaaagccctcaaaccccattttagctagtaacccccaaatataattttggcattcttgacatttatattctctccctccatcaatgtggtacaaacttattgagattattcctttgggtcccttaccattaggaccagtttaga

SEQ ID NO: 312 - DNA, 430 bp, Homo sapiens
  misc_feature (346)..(346): n can be a, c, g or t
  misc_feature (351)..(351): n can be a, c, g or t
  misc_feature (411)..(411): n can be a, c, g or t
actgaggttagaaggcacaggtggcgagatgagccgggtaccagcgttcctgagcgcggccgaggtggaggaacacctccgcagctccagcctcctcatcccgcctctagagacggccctggcaacttctccagcggtcccgaagaggggtcatgcagcccgtgcgcaccgtggtccggtgaccaagcacaggggctacctgggggtcatgcccgcctacagtgctgcagaggatgcactgaccaccaagttggtcaccttctacgaggaccgcggcatcaccttcggtcgtcccttcccaccagggtaattgtggttactcttttgagcccagcaatgggcaccntgctnggcggtcatgggatgggaaatgttcataaattgcaaagagaacagttgcattttttgccntttgccaccaatttttttg

SEQ ID NO: 313 - DNA, 605 bp, Homo sapiens
  misc_feature (471)..(471): n can be a, c, g or t
  misc_feature (568)..(568): n can be a, c, g or t
  misc_feature (584)..(584): n can be a, c, g or t
  misc_feature (588)..(588): n can be a, c, g or t
  misc_feature (594)..(594): n can be a, c, g or t
aaaacttcacatttctttttatgtggatctatcaaaaggtacataatcaaaacaactttaacacccgacctatccatgaggagtctggatgattcactctgaaggaaaaggggagagaagagagaatcactgctctgatttgaagtgtgcaaagttcttatctatgtcacttaacactggtataattaatacagaaaggaaaatgaccctcaagaggaaggtttcattgagcagagctaaagaggaacaataagagggtaggagacacctcctgagaaggtttgcttgtgttcagctgaagattaataggaaacagtgaaaaagcaacgtcctgtgatcagtaactttaaagacaagctggttctctctttctggcactactgacattcccaccattctagcttccaaattctggaaaaagagaagatgattaacccaaaatagagaatgtagaaacttctggttttgtgncctacaggattggcaccagaccctcagtgctcacttgctcatctacaaggcagcacccctcccagaggcagccagggagccttccaccagggccgcnctggctgttgttgggntccncctggngccaaccaagt

SEQ ID NO: 314 - DNA, 306 bp, Homo sapiens
caattttcagggtctttattttttatattgtatacctaagttgatttcatcaacatacaagccaaacgaagatcccatttcaattagatataccactcaagagaatctccaaagatcttcacatttttccatcttctaaaacaaggattgacaaacttttttctgacaaaaaccagacagtaaataattaggctttgtaggctttaccatctctattgcaactactcatttcaaagcagccacagataatatataaacagatgagtatagctagttccaataaagctttatttgtgaattctgata

SEQ ID NO: 315 - DNA, 551 bp, Homo sapiens
  misc_feature (489)..(489): n can be a, c, g or t
  misc_feature (506)..(506): n can be a, c, g or t
  misc_feature (543)..(543): n can be a, c, g or t
tttttttatgtttttatttttttttaagacaaggtcttactctgttgcccaggttggagtgcagtgatgcaattacagctcactgcagctttgaattgggctcaagtgatcctcccacctcagcttcctgagcacctgggaccacagatgtgtgccacttcgcctggctaattttgaaaaactcttttttgtagagccggagtctccctatattgcacaagctggtcttgaactcctgggctcaggcaattctcccacctcagcctcccaaagtgctgagattatagctgtgagccaccgtgcccagcctgaagctagaggctgttttcaatatgtcattattctcatttgggttaggataagattgaagggaggggtagaaagtttcaaaggcggagagtttcaaaggcatcatgttaacaggcagcaacacgatcaagccccacacgaaggaaccaccaagactggagtgtgcattcccattggtangaagtcctctgctaacntgttgaattcatctgcaaacgcaatgcagggttgtgnttggcctc

SEQ ID NO: 316 - DNA, 366 bp, Homo sapiens
  misc_feature (339)..(339): n can be a, c, g or t
  misc_feature (358)..(358): n can be a, c, g or t
gccagagttgccagattatttaatttgtatcggactatagaaaaataattgtcaacttggacattgtctttaaattcttgtcactggcccaatctttttcttaagtttaaggaagctgcagagtggactacaagttacattcttcagctaatacgtgcttttctaatattttccccgagatattacatttagaaaatacgcaaagaaaccttttaggagtaaacaaaacgcacccgaactattcattataaaggaaagaataaaaaatccataaataatacattggaatcaaataatataaagtattccgcagacataattttttttaattaataaacncccctttaattttaccccncccccaaa

SEQ ID NO: 317 - DNA, 446 bp, Homo sapiens
  misc_feature (81)..(81): n can be a, c, g or t
  misc_feature (294)..(294): n can be a, c, g or t
  misc_feature (305)..(305): n can be a, c, g or t
  misc_feature (331)..(331): n can be a, c, g or t
  misc_feature (382)..(382): n can be a, c, g or t
  misc_feature (432)..(432): n can be a, c, g or t
  misc_feature (446)..(446): n can be a, c, g or t
ccatgttaagaatattttatttgttttttgagattacatagtcattattgctgatctaatacaatcacttagacataaagntttccaagaacttctcagaaatggtgatctttagaagtgttattcctttcagtaagatgacagaactagatgattacgtatatagatatatagatatatatatatatatgtatatatagagtttagaacctgtccacatataatttgctggtgttgcctattttccttccgtaattttcctttattgaaaaagcttaatgcaacaatgcattntgattcctttntaaaaaccacggcaaagttaattttngagaaaaccacaggagcagcaatatccagatctgtttagagaaaagcgacnggccataaaagctttgcaggagtatgtggccatgggggagccgtgctcantatggggccagtan

SEQ ID NO: 318 - DNA, 386 bp, Homo sapiens
  misc_feature (355)..(355): n can be a, c, g or t
ggcagcaaacatcatcttctccagtgtgatgatatataacagaggtttgtacaaagcgctgtcaaaatacagggaaataactgcctgtgagtttgtggaatgcttcacaaagacagttgatctgagccatcagcaagaagtcaagttgaaggacaaggacagcagtgcaaaatgtggattatgtcacaatatggcatagttggatctgtgagtttaaaatgaaatagttactgctgagataccatttcttctctttgcaaggatacacatattcaacatacacaagagaggaatgtaaagaagtgcctaggcctcctgttttattgttttgttttgttattaatcttcattttcnttttgggaatctgcctaagagttatggcaac

SEQ ID NO: 319 - DNA, 411 bp, Homo sapiens
gagagttcaactattttattttgcaatctaagggatttttctctgcacttcaatcaaactggaaaattgagaaccatttgctcctatgtaacctctgctgaaccatgaccccaaggtctaaggagaaaccacataggataaatgtttacgcttcacgtggccacccagatccatttttgtttttgagtctggcttttctgtggctgaagatataccgcagtcagcaggtaatggctggatttgggcgcctccatttgtttcttctgcttccctaaaaaatttttcatatttgtccaggtatggtggtcgttcaggtagtaggtaataatgtgttgaactaaccttcttcccattttcaataatgggcagaatgaaggaaccttactggcagatccttcgctgttctgtctt

SEQ ID NO: 320 - DNA, 292 bp, Homo sapiens
ttttttttttagtgggggaagggtgagagctcagcactcactgctttattatcacagtaggtgacaaaggccgcaggagagggggaaaggtccagagctgtggagaaagaaggggctccctgtctccagggtttgtttaaggttttctccatggcctagggccagccacttccctcactggcctcaaagccctggagttgagccctctaggcagtcaagggcaggcaggagatgggccagagaggggaggatgtgttctttaggtacagaatccctgaccacggggtccagt

SEQ ID NO: 321 - DNA, 440 bp, Homo sapiens
  misc_feature (65)..(65): n can be a, c, g or t
  misc_feature (394)..(394): n can be a, c, g or t
  misc_feature (416)..(416): n can be a, c, g or t
taaaccatatcatatatatttattttagaataatcactgaggtagcagggtagaagatgcattgnaaagggtggcaagaaagagggtactgaaaacaaagaagaagataatacaataattcagataggagatgactgggcctgaatttggctaatagcagttatgatggagagcagaggagggatgcacaagatacttggagatagaattagcatgactttgtgtaacccttgtaacaatcaggttcatcctcgccaaagacttactaggtaaggggacattctgtcctgtagtttatctctcaccaatttcaagaaaagtgaagattttacagataagtagaagagaggcaagtaggacaggtgccccccaggcttttaaataatgtgacctngaggcaggcttggaaggaatcngggaccattcgagttttttaaaaa

SEQ ID NO: 322 - DNA, 399 bp, Homo sapiens
  misc_feature (5)..(5): n can be a, c, g or t
  misc_feature (388)..(388): n can be a, c, g or t
aaatnttacagatcttggcttaagaaaaaccagatttgtgactaaagaaaacattttcttggagctttgcattgttctggcttaaatttccttttaaaaagtaactttccgtaagttaaagttagcactttcacaaatactagcagagttactaaatgaaatattaacatcaaaacaaacatgattagcgaaggaagtattttattattttgctgcaaagctgttgcttcactgtataaaaatagcacccagcaaatgcagtgtatcggcaaaattaggatagtggggtgttccctcatctgacactggtaccaggccaccaaaccctcttcacttccaggtttatttcccatgggggaaggtccattagggattttccatccccaanccggggggttg

SEQ ID NO: 323 - DNA, 529 bp, Homo sapiens
tcatctttctctttattctgacaacattatgacattaaataaaatccaagaggtattggattagtccttgtttggtctctggtgatttagataaggcagaactgagcccctcggaatgtattatctcaaagagctagtagcagctgctatgcaaagttctaaggcccgagtcaaatcctgggcatctccacagatgtgtggtagggcacgggctccagctcttgtgtaagaaagaacaggaatgagaacagctttattttgtagcgccaaggtctcactatgctcacacctgtaatcccagctttgagaagaggatctggcaccagaagggtctggtagaagaaagtgggaaaggtgaaggacagggatcctttcccttctgctacaacctagggacagaggcacttgacttccgcaagggggccaaagaaggtagcagctacttggggttttgtgtgggagatggccgaccactccaagggaggtcaaatggcttttttcaggacgtggaatctcgtccaaaaaatgg

SEQ ID NO: 324 - DNA, 570 bp, Homo sapiens
tttttttttttttttgtggtagacatacagatctttgttttaattaaaatttttccttttacagtttgtacattcatgaataggtattcataggcagattagattttcctagatacaaagattaacaggaaacaaaaaaggaaatggtattatggggataaggctctatttgtgctgcaatagctctgtaaacttgattatattacctgtttaggtgataaatatgcgtaccattagaccaatggacatggaaaccatagaagccagtgtcatgaagacaaatcatcttgtaactgtggaaggaggctggccacagtttggagtaggagctgaaatctgtgccaggatcatggaaggtatttcaaagaaactggttctagaatacagtcaagctatagtaaacatcatgtacctgaatacgtacaggataaagagattgaaagctaggagtggccaaacgacttcaactttaaacttgtaagtttggcatttctcttcaggcagatatttttaaaagcaaatccagaaagcggttcccataattagcattcttacatttctcttctgggc

SEQ ID NO: 325 - DNA, 506 bp, Homo sapiens
atttctggaacacttggcaaacctttggttgtgttggagggtacatcgccagcacgagttctctgattgacaccgtacggtcctatgctgctggcttcatcttcaccacctctctgccacccatgctgctggctggagccctggagtctgtgcggatcctgaagagcgctgagggacgggtgcttcgccgccagcaccagcgcaacgtcaaactcatgagacagatgctaatggatgccggcctccctgttgtccactgccccagccacatcatccctgtgcgggttgcagatgctgctaaaaacacagaagtctgtgatgaactaatgagcagacataacatctacgtgcaagcaatcaattacgcttacgttgccccggggagaagagctctacggattgccccaaccctcagcaaaaaccccagatgatgaaccactttcctgagaatctgctagtcacttggaagcaagtgggggttgaagtggagcctcatttcctcggct

SEQ ID NO: 326 - DNA, 459 bp, Homo sapiens
  misc_feature (420)..(420): n can be a, c, g or t
ttttttccaggaaaaaaattaaatctttatttttaaaaatcccacaaatccataatgaaatcatcatctgaaaaaaaagatggtagggaacaaaacgtgggatacatttaaaaggcactagattcattaataccagagccattctggagatgccatgtaagaaatctggagttactctaaatcttcttcttagtggtatcagaactggggagaagggtccaagcaaagtgttgcctttgccagtgtattcggatcgaggttatgaggaagagcccttttcctttgtcagtgagtttcatgttggtccaccactccagcgctgacagctccccgatggccctgtcatcgtatctcaggacctccttcaggatgtgcgttgtgtgctgccgacaggggggcggcctggctctgacacttganttactgtactcacactgggctatgaagtacacagttaga

SEQ ID NO: 327 - DNA, 455 bp, Homo sapiens
tttttttttttttttttttttttgtacaccagtctgtaatttttaattagaattagctaaaagacattgtacctttcgcgtgtatgactgagcataacagtgcttaacagtgtctttattaagtgaatgcctgaaagtattcaacattaaattcaatttatttcacattaatgtttgcaaatacatcatcaattcttacatatttcaaatcaacttcaagtacagaaggcttcctctcaaataagtctcctgaggtgacataaagactgaaagaagcctatgacttgagtccaagtctcttaaccaacaatcaccatatcgtcactggtgaactcatacgtggggacttcaaggttgagaggagcaggacccaatctgatcctgccagatgcatcatagtgtgacccatggcaagggcagtaataaccaccaaaatctcctgcatttgcaatggg

SEQ ID NO: 328 - DNA, 395 bp, Homo sapiens
  misc_feature (238)..(238): n can be a, c, g or t
gctctgaagaagcaaagtagcagcagcacaaccagccaaggtggtgtcaaacgctcactatcagagcagcctgtcatggacacagccacagcaacagagcaggcaaagcagctggtgaagtcaggagccatcagtgccatcaaggctgagaccaagaactcaggcttcaagcgttctcgaacccttgaggggaagttaaaggaccccgagaacgggaccagtccccactttccagccngttccagaggagcatatctgctgatgattgacctgcaagagtcatccagacgtccccagaggaaatctctgtatgagagcttttgtgtcttctagttgatcgacttcgagaacttaggaccagatggagaagaggcagagggcccaggggcttggtt

SEQ ID NO: 329 - DNA, 278 bp, Homo sapiens
  misc_feature (148)..(148): n can be a, c, g or t
  misc_feature (176)..(176): n can be a, c, g or t
  misc_feature (182)..(182): n can be a, c, g or t
  misc_feature (222)..(222): n can be a, c, g or t
  misc_feature (248)..(248): n can be a, c, g or t
  misc_feature (275)..(275): n can be a, c, g or t
attcattgcaaacagaattcaaatgtcaataaatggcaatttgagaaactgagacattttaaaagacaacctgatcaggatcaggtaatatttcagtaacataatcaataaattacaataacatccaactgaatagaaacaaacaaanacagaaaataatttcaaatgggctaaangcaagntatacattctattttttctaacttttgaccacagtctaangtttccttttcatctttctctagggnactttcaaaatgcttatttattaacanaca

SEQ ID NO: 330 - DNA, 474 bp, Homo sapiens
ttttttttttttttttttttttttgaagtcataaatattaactaatttatttatgataaagctgcagtaatgaaaacaacatagtggctgtacacaaatagccaacaatgtggcagactagagagcccacagaaatcttcaggttgaacccaaccctgctacttcctagttgaataacactgagcaacttattttacttctctgtgctgcgtatcctcatctgtaaaataggaataataatctaactcacagagttgttgtgaggattaagtgatgtggttcaaacaactgctggtagtacaaagctgccgtcatcaaacatgatcatcatcatcattatgttttgacactggtagttgggttttctttagctgctgcttgagcctaacacaattatgcacccataaaactgcagaagaatttacttatgaaatttaacaagctagttataaaattacctagaagagaaaatgc

SEQ ID NO: 331 - DNA, 497 bp, Homo sapiens
tgaaagaagagggtattgagtacaaagttgggaaattcccatttgctgctaacagcagagctaagacaaatgctgacacagatggcatggtgaagatccttgggcagaaatcgacagacagagtactgggagcacatattcttggaccaggtgctggagaaatggtaaatgaagctgctcttgctttggaatatggagcatcctgtgaagatatagctagagtctgtcatgcacatccgaccttatcagaagcttttagagaagcaaatcttgctgcgtcatttggcaaatcaatcaacttttgaattagaagattatagatttttttttctgaaatttccctgggagcctttgtagaagtcacattcctgaacaggatattctcacagctccaagaatttccaggacctgattattgaactttttggaggtatttaaaaggtttggccaaaaggaatacgccttaatcagaattttgcctaaattaggatttggtt

SEQ ID NO: 332 - DNA, 488 bp, Homo sapiens
  misc_feature (58)..(58): n can be a, c, g or t
  misc_feature (381)..(381): n can be a, c, g or t
  misc_feature (394)..(394): n can be a, c, g or t
  misc_feature (416)..(416): n can be a, c, g or t
  misc_feature (432)..(432): n can be a, c, g or t
tttttttttgagatggagtctcgctctgttgcccaggctggagtgcagtggcagattnctcagctcagtgcagagagctagggaattttacaaacattccatggagaacatgactctgaaaaatctgcagatcactctcagttgtaagatctgttcatagaaatattggtgtagcacaactcagaagactgtgggctttctattcccccagatagtttaacatttctattcaaatgtcaagacaaaccaccagagaaccatgactttggaatatagttgtctattctctgagagtctttctttgggcgttaaaaaataagcaaagaaacagaaggtgtacaaaagaacccacccaatgggaaatttaaacaactgggaaantacaaaaccaaantggaaaactcactggcacaaancttcaacaggttaggntttgacaaaggaaaacattcagttgagggcctgggaggtcattaaaatttattctt

SEQ ID NO: 333 - DNA, 575 bp, Homo sapiens
  misc_feature (214)..(214): n can be a, c, g or t
  misc_feature (218)..(218): n can be a, c, g or t
  misc_feature (432)..(432): n can be a, c, g or t
  misc_feature (478)..(478): n can be a, c, g or t
  misc_feature (559)..(559): n can be a, c, g or t
aaatttaatttattttattaaaataacataattgagggaccatcagataactgtattttgtcaggtgcaataaaaacaaaattaaaacccaaatcatcaagaaaacctgtattcctggcttccttgtatacacatgatgtgactagagaaacaaggctgtttgtttgtttgtttgttagagaaacaaggctggccctgcggcccgccccatagngagnctcctggaagacaaaattcagcatgatggaagactgctccctgagagggctgagatgcggattggccgagtgccttgcctggaaaaccatcccaattgcactggacaccttagaagctgtgaaaggaggacgtgtcccctaagaaaagttccatagtaccaaagcaggctccttcgggcggccagagtctcggcagtcctgggctgtttggtgncttatgtgcaaatgtctggcgctgcaccactctctgaagaaaagtnccgcctgtgacatgcattcctccagaaagctgatttccaaaatcccatgtgtctccacatcagggctggactgcctgctancttacttcctctaaaa

SEQ ID NO: 334 - DNA, 669 bp, Homo sapiens; identical to SEQ ID NO: 296

SEQ ID NO: 335 - DNA, 493 bp, Homo sapiens
ttaaccaaggaacacctttattttcatctgcaaagaagaagctcttttcttctttttccaggataatcatgattaacttacaaaaatgggtacacatcttcaaagcacttccctttaacgggaaacttagctttatgggatttaaacattagaaagtgggaaaaaaaattccattttcttgtcattataagccaaaacaaaatctagtgtaagtcaaggaaactcattcacacttcaggtccttctcctccaggaaccagcattgttatattatttccatttagcaaaatctgatctaatttagtaatccttcttccttctggtgtgatttcaaactcagtgacatcttccagtaccatattgacaaagtcatcaaatcctagaagagtaccaacaatttccttatcactcttcatcacgatgtgaattcttgatcctatacatttgtccacaagctctaacggcagcagctgcgacgggttggtagtagcgt

SEQ ID NO: 336 - DNA, 410 bp, Homo sapiens
cgagaataaacaagagcgggacaaggagaaccggcatcggaagcgcagcacagccgctctcggagccgggaccgcaaacgccggagccggagccgcgaccgggcaaccgggaccagcggagccgtcccgggacaggcgacgacgcagcaaacctttgaccagaggcgctaaagaggagcacggtggactgattcgttccccccgccacgagaagaagaagaaggtccgtaaatactgggacgtgccacccccaggctttgagcacatcaccccaatgcagtacaaggccatgcaagctgcgggtcagattccagccactgctcttctccccaccatgacccctgacggtctggctgtgaccccaacgccggtgcccgtggtcgggagccagatgaccagacaagcccggc

SEQ ID NO: 337 - DNA, 469 bp, Homo sapiens
ttttttttggagcttattagaacatttatttttttctgaatgacaggccgggagtgggagtagctgaacagggcatgttagtggtgtgagtgctggcttaagcgaaggagctggagtgggggtttgtgttgggggagcagtgggatgggaaacacacctgtggggcagctgaactagaaagaaggatgcccaggatagctatgagacacctacaaagcatgtggaacccagttccctaagccgcacccgatccccagatccctttttttctcccttaagttaaaaaaattccttgaggcagcttaagtcagaggctgtaagggtcagactggtcacaggttagacagcagagtttgctccggccagcagagcacgttctggctggatggcactcaggctcctcagctgtggcatcatgcccgcgaagtgaagttctcaacagcgcatgttacataggcttcatggcttc

SEQ ID NO: 338 - DNA, 315 bp, Homo sapiens
  misc_feature (3)..(3): n can be a, c, g or t
  misc_feature (41)..(41): n can be a, c, g or t
  misc_feature (231)..(231): n can be a, c, g or t
  misc_feature (238)..(238): n can be a, c, g or t
ctnggcagctcccgctggctcctatgccctgccctaaaggnttcttgagctctgggaatgggaggggccaagagaaggaaaaccctgtctttagcaccctttaaaagaactgtgccccccttctcagtgctgcctttgcatgggcctggccggctcacattcgtcagtgactccaaccctcctgcttgctgtacttgggatgaaacgaccccacaggtcaggtggagggtngggcgtnggcatcagccagggatttgccgttacagtctttttcttcaggagctacaaagatctctttcctgttactaaaatggg

SEQ ID NO: 339 - DNA, 398 bp, Homo sapiens
  misc_feature (17)..(17): n can be a, c, g or t
  misc_feature (59)..(59): n can be a, c, g or t
  misc_feature (232)..(232): n can be a, c, g or t
  misc_feature (244)..(244): n can be a, c, g or t
  misc_feature (249)..(249): n can be a, c, g or t
  misc_feature (251)..(251): n can be a, c, g or t
  misc_feature (253)..(253): n can be a, c, g or t
  misc_feature (260)..(260): n can be a, c, g or t
  misc_feature (288)..(288): n can be a, c, g or t
  misc_feature (312)..(312): n can be a, c, g or t
  misc_feature (328)..(328): n can be a, c, g or t
  misc_feature (344)..(344): n can be a, c, g or t
  misc_feature (383)..(383): n can be a, c, g or t
  misc_feature (387)..(387): n can be a, c, g or t
taatggggcccccaggnggcttggggcacgggtgtccttaaatacagcccccatggcanaggcagcgggggcggggcggggtggggccgggcctgccggggcggggcggggcggggcgggacctcagctgcacttgcaggagcgcacgatcatgttggacagctgctccaccttgggcttgcggccacgtagtacacgatgggcagcggctccagcgcctgcgcacgagcancggcgccgccangccgngngnttgatgnctggttgtacagggccaggaccttgctntactgcgtgtccaggctccaaatntaggggcagggcccanggcagaagttggcatngtagcccttgggtccgtggatccacttccagcccaggtncttncggaagtcaat

SEQ ID NO: 340 - DNA, 355 bp, Homo sapiens
  misc_feature (118)..(118): n can be a, c, g or t
  misc_feature (133)..(133): n can be a, c, g or t
  misc_feature (144)..(144): n can be a, c, g or t
  misc_feature (147)..(147): n can be a, c, g or t
  misc_feature (151)..(152): n can be a, c, g or t
  misc_feature (157)..(157): n can be a, c, g or t
  misc_feature (164)..(164): n can be a, c, g or t
  misc_feature (175)..(175): n can be a, c, g or t
  misc_feature (180)..(180): n can be a, c, g or t
  misc_feature (185)..(186): n can be a, c, g or t
  misc_feature (188)..(188): n can be a, c, g or t
  misc_feature (190)..(190): n can be a, c, g or t
  misc_feature (195)..(195): n can be a, c, g or t
  misc_feature (204)..(204): n can be a, c, g or t
  misc_feature (206)..(206): n can be a, c, g or t
  misc_feature (233)..(233): n can be a, c, g or t
  misc_feature (326)..(326): n can be a, c, g or t
gggccatcatcttcttgaatattgccatctcttgctgccaaactatcttgtgaaatttccttaacaaatatatggcttgcaatcgaagaccatattcttcatttttccgggatttcancagtgtgactttagnagggttagganggntggnnggagncactganccgcctgtttnaccgnggggnnangntcctntctctactngnacttctatccctcggccaaatcttctnactccttctgttaaccacaccactccggccacttcttgggatcatgtatttcctcatcataactatcttcttcattatcaggatactgggttnagggatcagggaggatttaatgggtattt

SEQ ID NO: 341 - DNA, 559 bp, Homo sapiens
tgaattttcaattagttaatttcataagctacagcagaggcgtggaccctgccctctccacacttgaagagataagcccctgggatccaagtcccagcaaggttggtgccacccatcttggtgaaagatgctgttgttcctgtggaaaccatcaccagaggtaggaagggctttgagcctaaaaggaaacaagagggcgtgaatccaggccatcctcaggggagggtgggagccatcccaggcaaaaagggctaagctcagtgttggccaaggcgtcaaaggtgctggccaggcttcccagggagaacagaaactcagcagtgaaagccgcagaggggaagaagcaggctgatgtcaacagcgtggggctctgtcctcaccccaaggagagggagtgtgccagatcccaggccaccaagcggggccagctccagcctgggcgatctgtccagcagctgagagggaagctttaagcagaccagtgggtaggagaggagggagcatgcggcaggtggggcaccacaacaaggagagttccagaaggccaaggtgtggtcac

SEQ ID NO: 342 - DNA, 449 bp, Homo sapiens
  misc_feature (362)..(362): n can be a, c, g or t
aaaaaacaagaaggtatcgttggcagttctcgggtgtgttttgcacagcacaccccatctcttccagcagaaagtcctcggccattgaagctacaaagctcagctccagcaagttgaagctgcattatctggaaatggagaaaatgaagatttgctaaaattgaagaaagatttacaagaagttatagaactaaccaaagaccttctgtcaactcaaccttctgagacgcttgcaagttcagacagttttgcttctactcaacctactcattcatggaaagtaggagacaagtgtatggcagtctggagtgaagatggacagtgttatgaagcggagattgaggagatagatgaagaaaatngcaccgctggcaatcacctttgctggttatggccaatgctggaagtgacttccactgttgaacctcaagcctgttagaaggaaggga

SEQ ID NO: 343 - DNA, 453 bp, Homo sapiens
  misc_feature (4)..(4): n can be a, c, g or t
gcgnccgccttctcccgagccgagcacgaaggtttcagaggaagccgagtcccagcagcagtgggatacttcaaaaggagaacaagtttcccaaaacggtttgccagctgaacagggatctccacggatggcagaaacggtggacacaagcgaaatggtcaacggcgctacagaacaaaggacgagctctaaagagtccagccccatcccctccccgacctctgatcgtaaagccaagactgccctcccagcccagagtgccgccaccttaccagccagaacccaggagacaccttcggcccagatggaaggcttcctcaatcggaaacacgagtgggaggcccacaataagaaagcctcaagcaggtcctgggcacaatgtttattgtgtcataaataaccaagaaattgggtttctacaaagatgcaaagactgctgcttctggaattccc

SEQ ID NO: 344 - DNA, 415 bp, Homo sapiens
  misc_feature (186)..(186): n can be a, c, g or t
  misc_feature (235)..(235): n can be a, c, g or t
  misc_feature (242)..(242): n can be a, c, g or t
  misc_feature (257)..(257): n can be a, c, g or t
  misc_feature (319)..(319): n can be a, c, g or t
  misc_feature (372)..(372): n can be a, c, g or t
  misc_feature (385)..(385): n can be a, c, g or t
  misc_feature (410)..(410): n can be a, c, g or t
tattttattagtaaaatacaaaatggcacagacgttggtgatgagggttggaaaagtctttccaaagtcttcctactctttccaaagtcttcctagatcatccttgtccatgtcctgcttggagaaactaacaaagtccatggaagggggaccaactggccccagcggcttcctcacaaaggaggncagggccccatcacagggtgtcccacccctgaaagggctctcccagccngggaagnagccaggaacaaagntgcattgggacccactcccaccctctctgaggctgccaggaggtggaccccacctgaggccnggggccctgaggctttcctggaatatggctggcggccacacccagcagggggnagtgcagagggcngggtgggggcagggggcagcacagngtttt

SEQ ID NO: 345 - DNA, 457 bp, Homo sapiens
  misc_feature (1)..(1): n can be a, c, g or t
  misc_feature (372)..(372): n can be a, c, g or t
  misc_feature (392)..(392): n can be a, c, g or t
  misc_feature (409)..(409): n can be a, c, g or t
  misc_feature (422)..(422): n can be a, c, g or t
  misc_feature (442)..(442): n can be a, c, g or t
ncgcccaggagtcctcggccagccctgcctgcccaccaggaggatgaaggtctccgtggctgccctctcctgcctcatgcttgttgctgtccttggatcccaggcccagttcacaaatgatgcagagacagagttaatgatgtcaaagcttccactggaaaatccagtagttctgaacagctttcactttgctgctgactgctgcacctcctacatctcacaaagcatcccgtgttcactcatgaaaagttattttgaaacgagcagcgagtgctccaagccagggtgtcatattcctcaccaagaaggggcggcaagtctgtgccaaacccagtgggtccgggagttcaggattggcatggaaaaagcttnaagccctaattcaatattantaattaaaggaggacanaagagggccagcncacccacctccaacacttcntgaggctttggaagg

SEQ ID NO: 346 - DNA, 177 bp, Homo sapiens
actagttttgcaatggttttgaatgaagtagacaaagacatggagagtgtgattcccaagacagactgcaggttacggcctgacatcagagccatggaaaatggagagatagatcaagctagtgaagaaaaaaaacgacttgaggaaaaacaaagagcagcccgcaaaaacaggtcc

SEQ ID NO: 347 - DNA, 215 bp, Homo sapiens
  misc_feature (105)..(105): n can be a, c, g or t
  misc_feature (137)..(137): n can be a, c, g or t
  misc_feature (176)..(176): n can be a, c, g or t
  misc_feature (205)..(205): n can be a, c, g or t
  misc_feature (210)..(210): n can be a, c, g or t
taaattcattagttggtatttatttaaaagcaatcgaaagtttcacttctgttttcaatatatgcatacagcctacataacaaacgaagtcagctttaaggtttntattgaatttatttggacaaatccgtactgtntccaattctcgtactgcattcttgcttaaatagtattanccataaaggaggtcaggtttatagggttnggttnaccta

SEQ ID NO: 348 - DNA, 435 bp, Homo sapiens
  misc_feature (156)..(156): n can be a, c, g or t
  misc_feature (343)..(343): n can be a, c, g or t
ttttactttgaaattactttaatttagaaatagaaaacatcttgaaaggaaaaaaaaaaacccacaaaacatacaggcaaatttgtattctgtgagtttctcacaccctcacacttgttcaccaatctctaagatgaaaaactctcttccaaaatngtattcagccaccaacaatgatgttattaataggaatatgggatcaatttcacaaagaagccaatgaatcccattatagcaaatcctattgctgttgccatggaatcttctggaattcttttctatcaggtttagtgcatcttttaaccagccgaatggagtcccttacaaactggccggacttggntcaacaaactgcattacctgatccatggactggcctacccaaccggacacctaaaatggccaggggacacgtagcactggaggcctcgtgcc

SEQ ID NO: 349 - DNA, 477 bp, Homo sapiens
  misc_feature (417)..(417): n can be a, c, g or t
taactttaaagctggatacattccgattgatgaagatcgtctccacaaaacagggttgagaggaagaaagggcaatttagccatctgtgtgattatcctcttgtttatcctggctgtcatcaatttaataataacacttgttatttgggccgtgattcgcattggaccaaatggctgtgatagtatggagtttcatgaaagtggcctgcttcgatttaagcaagtatctgacatgggagtgatccaccctctttataaaagcacagtaggaggaaggcgaaatgaaaatttggtcatcactgggcaacaaccagcctattgtttttcagcaagggacaacaaagctcagtgtaggaaaacaacaaaacttctatttacaagtgacatcggcatgcagtttttttgaccccgagggantcaaattatctttatttcagcacagactttgggaactcctggagttttcctttggccagt

SEQ ID NO: 350 - DNA, 198 bp, Homo sapiens
  misc_feature (195)..(195): n can be a, c, g or t
tttttttgcaggatttgaccgagtctttatcgtggcttccgttacatcttattctaactcaggtttacggacacaatgctggaaaaccaattcctgctctacccacgcctcaacttgttaagaaaaaacaggatctaacaccgaggaatgtcacatcttcgccattcccacttcctttctgccctaggattcganatg

SEQ ID NO: 351 - DNA, 474 bp, Homo sapiens
cctattgttaccctctttattccaaaacaattacacatttcaacttttcaaaagcaacatctgggtaagttaggaatattcacagcttcttacacagtgtcagagaaagagactatctgagctcaccaggtatctgctgtgtgttggggaaactgaaaaacaagcaaaagtataactacaatctggacttttttcttttttaaataaagttttttttttccatttttcttctcatactgtgaattgttcttgactccttttcttgacattcagttttcagaatttccatccttcctctggaactaatgtgctgttcccctgactgcctgctgggccagcatccgattgccagccagaaacgtcacactggccaagatggccaggtacttcaaggtctggaacatgttgagacgagtccagtagacatacatgagtcccagcatagcagcatgtcccaagtgaaatataatcgtg

SEQ ID NO: 352 - DNA, 410 bp, Homo sapiens
taactaatcatttgtttttctaaatcagtctataaaagaacaaaacttttaaaatcttgcagaggctgtttcatcagtaaactctcctagggagctactactgctgtctaaacctctgtgaaatggtaggcaaaaaaagccatcaaaggatcacaggagataaaacaccaatcagtgtaagctgttaaagatgactgtgattaaataaccaaatatcaaatatccaataaggtaattaaatttagattaaaaaaaaactaagcaccagctgtacatacattattaaatgttctaatctctttcctgattcatagccatattctacatgatgatcaaagactgtccactgtgctacctaccatcattttaaacactgcctgatctgtatgatggtggaattatggctatgg

SEQ ID NO: 353 - DNA, 354 bp, Homo sapiens
tgccttaacaaaaataatttattccacacacctcccaaggcagggggtagcgtgggaatcaagcatgtgtaaggcactgcccccgccagacccttctaacttctgcacactggaaggtgaaacctggagagagaagacactcccctccctagcttctacctggcaccctccaaagatgagcattcatcttggagaccaaaataaaaaaggacaaaagaccaggctcagagggagcagagctcaatggggggaagtgaaagcagccatcttctcctgcagctaagccagggcaaggcactagagacccacatccttcccatgccaccaactcgtcaggtcccaccaagcaagcca

SEQ ID NO: 354 - DNA, 425 bp, Homo sapiens
  misc_feature (1)..(1): n can be a, c, g or t
  misc_feature (23)..(24): n can be a, c, g or t
  misc_feature (425)..(425): n can be a, c, g or t
ntcaagctccagcaatttttatnntcatgaatgagagttggggatcagctgttaggttctgtgcccaggacactgactgctgcctggcgcccactctctatacagtcattaacagcaactccctcataggaggctccagccagagtcaggggcaacctgtgagcagtcaggaattgcctagctgactctagtttttgccagtgacctagtgtatactggggaatgcagttcttgtgtagatggaccaagcagtggctcggcatctccttcagtcctaattgtgtagcagctgcttcctgggcccgctgttgaaacagctcctgagataagacacagccactagcctccagtgtctgtaaccaggaacctcccagcatcacagtcactctgaggccaggggggctcccgtcctgctcagggaaagn

SEQ ID NO: 355 - DNA, 283 bp, Homo sapiens
  misc_feature (29)..(29): n can be a, c, g or t
  misc_feature (99)..(99): n can be a, c, g or t
  misc_feature (169)..(169): n can be a, c, g or t
  misc_feature (182)..(182): n can be a, c, g or t
  misc_feature (196)..(196): n can be a, c, g or t
  misc_feature (244)..(244): n can be a, c, g or t
  misc_feature (276)..(276): n can be a, c, g or t
ttttaatgtgtacatttctcatgtatgancaccaaaccattatttacctaatgaaattgtgaaaaactatacatattcagcaaaatgttttaatttggncctatattaaaagacccaattgccaagggattttacacaaatttaattcacaagcatgtacacaagagantcactataaagancattgcttcctggnttatgaataaaaagtttatcttctacttacactaaaacatacaaaacntaatctacaaaaatcgtttacaattgattttngctaaag

SEQ ID NO: 356 - DNA, 534 bp, Homo sapiens
tttttttacaggttgaattagttttatgtagaacaagtcatgaacactttagtgtggaaaaatagtattatataaagcttaatattaaacattatgaaaaatacatatttacagaagaaactacaaaatacaactatgtacaataatatctgttacctttaaattatataaaattttaaacattctccagattaataaattatacatagtatcaacagaaatagctggcacctctgtagggcatgaagcaagtttttaaaaacaaatcacacagtgaataatttttatccaggagctcttcaggtacattctcaatgccttgaatagactggatctctgtgatactctggattcacattttcatagattggaaacaaggggttttcttgttcactccgtagctttcttgctctgaggacatctcttacacactgatgtaggtagacatactgacactcagtctggacaatgtgaaccctgtggagtcttaggtcgtgcaactgtccaataaattcacaaagtcttaggagtcta

SEQ ID NO: 357 - DNA, 572 bp, Homo sapiens
ccaagtatatggcttttatgatgaatgtctgcgaaagtatgggaatgccaacgtttggaaatattttacagatctctttgattatcttccacttacagctttagtagatggacagatattctgcctccatggtggcctctctccatccatagacacactggatcatataagagccctggatcgtttacaggaagttcacatgagggcccaatgtgtgatctgttatggtcagatccagatgatcgtggtggatggggtatttcaccacgtggtgctggctacacatttggacaagacatttctgaaacctttaaccatgccaatggtctcacactggtttctcgtgcccaccagcttgtaatggagggatacaattggtgtcatgatcggaatgtggttaccattttcagtgcacccaattactgttatcgttgtgggaaccaggctgctatcatggaattagatgacactttaaaatattccttccttcaatttgacccagcgcctcgtcgtggtgagactcatgttacacggcgcaccccagactacttgctataaatttctcctgggaa

SEQ ID NO: 358 - DNA, 453 bp, Homo sapiens
tgaagctgtacccaatttaattccataatcaatctatcaattacagtccgtccaccacctccctgtggactgtcctgagctctgttgggttcctgggatggaatcagtgcatcataaagggcattctttaagcagagaaggggccaggccaccccattcaggaactgctgcgggaataaagtgctaacttgcccccaggctgtctatgggagaccctgggcccagtctgggatgtacagggctctgggaagggggcagtcctggcggcagaacccggcctgcaggggcactttgcttagaagaggactctcctagcgggagaggctgggaggggctgcatcaggccgtggagctggttgctgtggtcatcagtatggctgcttgttcaggaagcgggagaacatggtgaaggcagcgaggggcttgtcggtgggaacatgtggccggcgccct

SEQ ID NO: 359 - DNA, 428 bp, Homo sapiens
gagcctacactccggagggctgtacctttagcactggccctcatctctgtttcaaatccacgactcaacatcctggataccctaagcaaattctctcatgatgctgatccagaagtttcctataactccatttttgccatgggatggtgggcagtggtaccaataatgcccgtctggctgcaatgctgcgccagttagctcaatatcatgccaaggacccaaacaacctcttcatggtgcgcttggcacagggcctgacacatttagggaagggcacccttaccctctgcccctaccacagcgaccggcagcttatgagccaggtggccgtggctggactgctcactgtgcttgtctctttcctggatgttcgaaacattattctaggcaaatcacactatgtattgtatgggctggtggctgccatg

SEQ ID NO: 360 - DNA, 501 bp, Homo sapiens
ggtggtaaaatttcaactttatttggccaatgtgttcaattcgattgtgaaatagaaatgcctgaagaactgtcagcgtctgattcagctccagcatccttggccacctccccacccgggagtcaagggtcgtggttctgccttgaacaggccacaggcgtgctgtagagaggccagtggtcacaatgagcccacgacaggaggaggagccctggcttgagggaaggggaaggcccaggcctgtgccgggacccagggctggcagccaccagctcctcttccaggcatgggggacaccctgacaggatccggaagtctccatttacccaaaaatgcaagagccatgatcagtcatggcgacactgcaggcggtactgagtgaccatgtccagtccggctccgtccctcccacacgggggacaagcttctccgaggaggcctggccaaggtggaacaaataccctgatgtcgaaaaattctaaaatccacagacggaatttt

SEQ ID NO: 361 - DNA, 469 bp, Homo sapiens
ctgacatacggataaacttttattgacataccaaagagaaaccaatattcactgaaggctgccgaatccgtatttctaagagtaaaggtgtttaattgactctccacacttaaagcactttgtatgaaatatagctacaaatatacataaagaattcagatcacaaaactctctaggacattggctgggcgcggtggcccaagcctggtaatcccagcactttgggaggctgaggcaggcggatcacaaggtcaggagatcaagaccatcctggctaacacggtcaaaccccgtctctactaaaaatacaaaaaattagccggatgtggtggcgggcgctagtagtcccagctactcgggaggctgaggcaggagaatggcgtgaacctgggaggcagagcttgcagtgagccgagaccgcgccactgcactccagcctgggcaacagagcaagattctgtctcaaaaa

SEQ ID NO: 362 - DNA, 146 bp, Homo sapiens
tggtggtggacggactgtaattgatagattgattatggaattaaattgggtacagcttcaaatcccgtcttctctgtggcactgggggttagagggggcactacaggctatgaatgtgggaaaagaggggctgagaggggttgggg

SEQ ID NO: 363 - DNA, 337 bp, Homo sapiens
ctcaaatgtcatttattagaaaatacaattcccgttaaaggtgatacaagggattctgggaagtgggaagtatatagtacacagatctctttttatcaggagcatataggtcataataaaatgagctttaggcacaaagccagtaacacatttatggtccgtgcatctggaaaagtttcatcgttcactccccactcctcttccccctcctggaagcagccagctttatccttggcattttaattttagagaaaatttaaacttccatgctgccctgtggcttcggtcaatggagcttctttctccagttatggaatgagtcagcaaaacggggagt

SEQ ID NO: 364 - DNA, 455 bp, Homo sapiens
cagatatcgtacccaaaactgcggaaaattttcgtgcactgtgtacaggagaaaaaggcattggacacacgactgggaaacctctccatttcaaaggatgcccttttcatcgaattattaagaaatttatgattcagggtggagacttctcaaatcagaatgggacaggtggagaaagtatttatggtgaaaaatttgaagatgaaaatttccattacaagcatgatcgggagggtttactgagcatggcaaatgcaggccgcaacacaaacggttctcagttttttatcacaacagttccaactcctcatttggatgggaaacatgtggtgtttggcacagtaattaaaggaataggagtggcaaggatattggaaaatgtggaagtgaaaggtgaaaaaactgctaaattgtgcgttattgcagaatgtggagaatttgaggaaggagatgac

SEQ ID NO: 365 - DNA, 475 bp, Homo sapiens
  misc_feature (250)..(250): n can be a, c, g or t
gactacaacgtggcccttcagagatcgcggatggtcgcacgatcctccgacacagctgggccttcatccgtacagcagccacatgggcatcccaccagcagcaggcctgtgaacaaacctcagtggcataaaccgaacgagtctgacccgcgcctcgccccttatcagtcccaagggttttccaccgaggaggatgaagatgaacaagtttctgctgtttgaggcacagacttttctggaagcagagcgngccacctgaaaggagagcacaagaagacgtcctgagcattggagccttggaactcacattctgaggacggtggaccagtttgcctccttccctgccttaaaagcagcatggggcttcttctccccttcttcctttcccctttgcatgtgaaatactgtgaagaaattgccctggcacttttcagactttgttgcttgaaatgcacagtgcagcaatcttcgagct

SEQ ID NO: 366 - DNA, 843 bp, Homo sapiens
ttttttttttttaattagattatattttattagacattctttacaaatttaaaatactgttatttttacatgcacaaaggaaaatcaatttggataattatatttaggcattcattaaaatcaaccacaaaatagagacacttcattgtgtcatttatcaacatacttgatatgtatatctaaagtgcattatgttacaaaaaatatagaaattcagcagcaccaagatacatttacaaaataaatacatcaatggacaaaataaattatggtaaatgtgataataataattggattagccttggaaaaaaaaaaatattcacaatgaccaatgtgcagtttcatagagcaatgggggagacagttttattccaatgcatttacatatttacagacaataaatatttctaatactttccatatgttcactattacagaatcctgcaatatgtccttggaaggtctctgctgaaaatttcaatgcctccgtgaatcgagctccagcgacgttgtggaggtgtcagacaggtggtccccttctagccccactccagtcactccagagtctaaccaggcagagcgagttcgccgttttttcttttcctgctccttgcgtttaccgggcttgcctttctttttcttcccaggtgtcttgaggggctgctctttgttacgtctccaccctgttagttttctggagttaggtatctgcccccatcatcagacccaaatcgggcggggggggttctttttgttgtggagaggctttggagttaagggacacccccgaggagactcccatttccgacgttgtggttttttgcatcacaagggtgaagagaa

SEQ ID NO: 367 - DNA, 301 bp, Homo sapiens
gtagcctcagtgtatgatgggaagctgctcataggcactttataccacagagccttgtattgtgaactctaaattgtacttttggcatgaaagtgcgataacttaacaattaattttctatgaattgctaattctgagggaatttaaccagcaacattgacccagaaatgtatggcatgtgtagttaattttattccagtaaggaacggcccttttagttcttagagcacttttaacaaaaaaggaaaatgaacaggttctttaaaatgccaagcaagggacagaaaagaaagctgctttc

SEQ ID NO: 368 - DNA, 267 bp, Homo sapiens
ctatcggacctcggacagtgatccacctaaagcaagaattattgcggaacgcgggccaatagtgattggcgaagggaacctaatagaagaacaggcccttatcataaatgcttacccagataatatcactcctgacactgaagatccagaaccaaaacctatgatcattggcaccaataatgtgtttgaagttggctgttattcccaagccatgaagatgggagataataatgtcattgaatcaaaagcatatgtaggcagaaatgt

SEQ ID NO: 369 - DNA, 460 bp, Homo sapiens
  misc_feature (15)..(15): n can be a, c, g or t
  misc_feature (17)..(17): n can be a, c, g or t
  misc_feature (66)..(66): n can be a, c, g or t
  misc_feature (72)..(72): n can be a, c, g or t
  misc_feature (84)..(84): n can be a, c, g or t
  misc_feature (129)..(129): n can be a, c, g or t
  misc_feature (213)..(213): n can be a, c, g or t
  misc_feature (225)..(225): n can be a, c, g or t
  misc_feature (228)..(228): n can be a, c, g or t
  misc_feature (285)..(285): n can be a, c, g or t
  misc_feature (325)..(325): n can be a, c, g or t
  misc_feature (342)..(342): n can be a, c, g or t
  misc_feature (351)..(351): n can be a, c, g or t
  misc_feature (365)..(365): n can be a, c, g or t
  misc_feature (391)..(391): n can be a, c, g or t
  misc_feature (417)..(417): n can be a, c, g or t
  misc_feature (436)..(436): n can be a, c, g or t
  misc_feature (451)..(451): n can be a, c, g or t
gctctaactactttntncggctctacacggagccgtaggctggtgaacctgccgacaccggacttnagcatnccctacaacgtnatctgcctcacgtgcactgtggtggccgtgtgctacggctccttntacaatctcctgacccgaaccttccacatcgaggagccccgcacaggtggcctggccaagcggctggccaaccttatccggcgngcccgaggtgtnccnccactctgattcttgccctttccagcagctgcagctgcgtttctctctggggagggnagcccaagggtgtttctgccacttgctctcctcagagttngcttttgaaccaaagtnccctgggancaggtcagggcgtnacagctgtgttgtccagtacaggagncacgagccaaatgtgggtattttgantttgaattaatttagaaantcatttgcctcaacngttagtggg

SEQ ID NO: 370 - DNA, 398 bp, Homo sapiens
ttttttttttttttttttttttttttaaaaaagtttattttccacactatttgtacagctgtaaactcaaggaatcatccaatacttgtacaaatctgggagaacagttaataagcaccttcagtggtttccacagtttaagaatttaccattaaaaaattttagaataaatctaataaaatgaataaaatagttataaaaatcatacaaaatcatgatgaacatttgatatagagggtttaatatgaaacgataaatacaaaaagtgagactaatttatggatttgggctacgtaaaagacctacatggtcctcgaatcttgtgattcttggggctatatttgcctctcaagacaaactccaattattcaaggaagactttctttcaattcaggttc

SEQ ID NO: 371 - DNA, 493 bp, Homo sapiens
  misc_feature (199)..(199): n can be a, c, g or t
  misc_feature (267)..(267): n can be a, c, g or t
  misc_feature (279)..(279): n can be a, c, g or t
  misc_feature (301)..(301): n can be a, c, g or t
  misc_feature (311)..(311): n can be a, c, g or t
  misc_feature (336)..(336): n can be a, c, g or t
  misc_feature (448)..(448): n can be a, c, g or t
  misc_feature (453)..(453): n can be a, c, g or t
gctcgctatcaagcagctggacgccccgtcgatggccgtagacgtccaccagggcccagagcgggtcggccgtgcggacccgctggaagaacagcataacagccgagtcgttgatgcggtggaagacacggcccttcttgtccacccagaatgcgatgatgttgccctcattggcaaactcctcaggcagcgctttggnccaagaagcactctgggacaccaggtcgggggggcgtactttggggaagcgagtcagggtggattgcngggacggggtcntttgctggtgaagcccaagccngcaggccccngctccagcagcacttgcttcttggntgatctttcaagcttgactttgctccgtagatgaaggacccgggcggtttgcttgaaggttgattggcgtttgcaagaagcttggccttgccttctttgacagcccttgttngcttnaaggttccattgaagattctttgggaagcccttgggtgtt

SEQ ID NO: 372 - DNA, 379 bp, Homo sapiens
gctctccaggcgtcacgcagtgcgcggtccagtgcggccggaacctggcgcaactcctagagcggtccttggggagacgcgggtcccagtcctgcggctcctatctggggagtgcgctggtcggaagattgctggactcgctgaagagagactacgcaggaaagccccagccacccatcaaatcagagagaaggaatataccttcttacgctatggcaggtaagaaagtactcattgtctatgcacaccaggaaccttcgtctttcaacggatccttgaagaatgtggatgtagatgaactgagcaggcagggctgcaccgtcacagtggtccgaatttgtatgcaaggaacctttgagcctggggccacaagccaaag

SEQ ID NO: 373 - DNA, 475 bp, Homo sapiens
  misc_feature (104)..(104): n can be a, c, g or t
  misc_feature (231)..(231): n can be a, c, g or t
  misc_feature (303)..(303): n can be a, c, g or t
  misc_feature (326)..(326): n can be a, c, g or t
  misc_feature (346)..(346): n can be a, c, g or t
  misc_feature (361)..(361): n can be a, c, g or t
  misc_feature (386)..(386): n can be a, c, g or t
  misc_feature (391)..(391): n can be a, c, g or t
  misc_feature (404)..(404): n can be a, c, g or t
  misc_feature (415)..(415): n can be a, c, g or t
  misc_feature (420)..(420): n can be a, c, g or t
  misc_feature (433)..(433): n can be a, c, g or t
  misc_feature (440)..(440): n can be a, c, g or t
tttttttttgagatggacaaatatctttatttacagcaacagatagaacagaccctccctcccttcccttcctttccccttccagtcttttccatactgttccncctcccgccccaccccaggctctcgcctagccctgccctctggggttcactgcgtgggttaggcccccaaaaaagcctaggaaaggagactggagagggctggctgagggtgggtggggcgtctctncacatttttctgtcctctaagcctggggtggaggagagaggcaggcaccaggagcagggagaggtagagagntacggccccaccggcccaccctncccaagtaactttcacagtnttccccagccctggntgccctttgcggcccctaccccagncctgnccctaggtttgtnctgttaggttntcagnaatttattgaacntggtaancaattaaagatttcaaggtttttttggccatgggg

SEQ ID NO: 374 - DNA, 234 bp, Homo sapiens
  misc_feature (203)..(203): n can be a, c, g or t
ttttttttaaaaatcaaaaatgaaatatttattaccgctttttgtgacttaacaccttttttttttaacataacgtcacagtcctcatacaagtattttaatgtaaatttgacaaagcttaaaggtaacagcattttcttctagtgaggaacacgtgctgagaaaagaagaattcatgggacatacaataccaattccacagncagatctggatactaggcaaaaacattcttt

SEQ ID NO: 375 - DNA, 581 bp, Homo sapiens
  misc_feature (528)..(528): n can be a, c, g or t
  misc_feature (538)..(538): n can be a, c, g or t
  misc_feature (560)..(560): n can be a, c, g or t
ttttttttttttttttttttttttttttttttttaaagtatcacaccagaagtttattatggaacaatcacatatgttgactctcctttgaccctcactgcagtgcactttcattacttatcaatctgggggcgggaaaaaggggtgcagccagacaagagaatatacaggaaagaagcattgtatataagcctatgtatttcagtaatgctgctacagggggatacaaaatcaggtgccagcctccagaaaaaaagagattttttttcttccctcagtctcatttggcccctcggcgcttcctgaagtagcgattataggcagcattgtatccataaaccatggcgtagtttcgcaaagtctgtagtcatcacaggcttccctattgagctcgtggacaggcttagagcgttctcggatcctctcttggactttagctctccatctctgctgaggggatatgaaggtatttgcattctcctgttaatgaagggattaagttcataagattccatgctttcatgtgantcataacacnaagttctaccgtaaggggccangatggaagaaggtcagctctc

SEQ ID NO: 376 - DNA, 340 bp, Homo sapiens
  misc_feature (249)..(249): n can be a, c, g or t
  misc_feature (266)..(266): n can be a, c, g or t
  misc_feature (278)..(278): n can be a, c, g or t
  misc_feature (326)..(326): n can be a, c, g or t
  misc_feature (332)..(332): n can be a, c, g or t
  misc_feature (337)..(337): n can be a, c, g or t
ttttttttgtctggtaattttaagggattctcaatatacacacagattaagagttttttgccttggaaaaataaaactgaagttgcaagacaatctgaattgaaaccatcttcactaatataacttgcaaaaaatattttggatgaaagattacaatacattattaacttactttttaaacacagagtaaagttactcttggtaaaattaactcacccacatggcacattatttttgaagtatgttcancattaccaccttgtccncaaattaccatngggtgatttacctttgaggccttctctgccctttaaattcaggcaatnctgggnttatnctg

SEQ ID NO: 377 - DNA, 398 bp, Homo sapiens
gtttttttttttttttttttttgtattaaatgtatttttattgtgtgttctacatggtttctcagtgtcttagaaatttgctatgtatgtattaaaaatttttggatggttctttaaagatacatggtaggttttcagaaattagttgtgcagtaatttggttaatgaaaagtagtaagggttaagggaagagataggaagcctaggagtgtggtatgtacatcaaatgattactttttaagcccctctaggctctgataaccctttccccaagtcagatcccaacaaaattcatcagtaactgaagtgattgtgctaacagatacataaagactaccggagaaaagtgggttgagatgggctcagacttattgttaggacaactctgggagtcttgt

SEQ ID NO: 378 - DNA, 540 bp, Homo sapiens
ctctgtcatcatttcctgggttaactgcttacaccgatcctttgtagcagcagcatcttccttcacagcagcgagtaacttgtccttttcttgaagctgatgtataagcgtagtcaattctcccgtacttgacttctttaaagcatcttgtattacaccagacttctcctttagcaagtctacaacacaaagagcctcatcttcagaaaacatcatagtcttcaaggacagaagaaaatctttaaacttcacttcagcattttctttgtcagtttcggtcttcagttttttagtcccagatttctggatcccttctacttggtcaggtttaagcaaatcaataacctctctcttatctaccacaggacttgagtcagcattatccatcaaaggaatataagtagttgcatgaataaggggttcatctacgaagacattttctgtcttttgtttacatgatgaagctttcttcttccctgaatcactttcgttgtaggctcttggttgaagggcaatgcgtcttgacttttgtgaaggtac

SEQ ID NO: 379 - DNA, 455 bp, Homo sapiens
  misc_feature (445)..(445): n can be a, c, g or t
gtggtacagaatgtttaattacagcagggcagtgattccagttaaataaaattaaaaacctttattttcccaaatataaaattactaaattaatgtcttaaaagaaaatataacatggtgacagctttaaagtacaccaccattcaccacaggatttatgatttaccaattacatactccaccattttggcaaaaggatgaaattcttaaaactgtttataaacctaatatagtaaagactgtatacatctccatattgcacatttttatgtacaagaataaaacattaaagtgtattgcatatactggaacagcacaaatttatcacaattaaacttaatgcataagcccatgtgagtattaaaaatgtagaaatggtaatacatatatggtacagaatgccaggactggtattaaccatggatatggtacataaccatatacnggtaccacct

SEQ ID NO: 380 - DNA, 397 bp, Homo sapiens
  misc_feature (92)..(92): n can be a, c, g or t
  misc_feature (98)..(98): n can be a, c, g or t
  misc_feature (133)..(133): n can be a, c, g or t
  misc_feature (309)..(309): n can be a, c, g or t
  misc_feature (332)..(332): n can be a, c, g or t
  misc_feature (344)..(344): n can be a, c, g or t
  misc_feature (384)..(384): n can be a, c, g or t
  misc_feature (394)..(394): n can be a, c, g or t
ttttaatattcaaaacatttattatggttttcattttataaaaatgtatattttttaagggatgggagaatgttaaatacttcatgctaggnagaccntgttattaagaacccttccactgtagtaacttccnccagttcatacattcatgagtgcagggtacatatataaatatccacacggcatacatccacacacactgcctcgagggctggggaagactaaaatttattgggccacacacaggcagggcctctgggtgggactcacccacattgctcccggggggagcagtggggctcacttccntctctctgggggctctggccttnaaaaaaggaccnagggaccctacaacacgtcggttaaaatcccaactttttnaaagccaggnggg

SEQ ID NO: 381 - DNA, 117 bp, Homo sapiens
agagtacgttctgcattttatttctgcaggcaacacttttgctcaccagcaagaacacagcccgaggaagggacccaataacctttcaaaacgcaaactgctgcctgcggtgagggc

SEQ ID NO: 382 - DNA, 503 bp, Homo sapiens
ctggtcggcgtcatttgtggacttttaagtttaagcagctttatctataatgtgggagcatggttctgtagactaccttgctaaacttaggactccttttacaaacacattccagtgctcataaagaactggtagtattagctcagtgtaccctctaaagagtatctcccccaccttgaaagagtgtattctcaagattcttcttgggcagttttgtcccccttaagtataaccactcatagaatcctgcctatctgccctctcactctggttggtggagtgtcaccttagcactctatgaactactcaagttcacagggaactctcagccacaacttgtggctccttctcactaagtgtggtcatggacactctctttgtaaagcaccataatctaagacagagcaggggctgtggcagcacgctggtaccgtggtcagtcacagcagcttggtgtctaccagccacagagaagaccccactgtatggaggctacaattaac

SEQ ID NO: 383 - DNA, 473 bp, Homo sapiens
aacagaaacaacatttggtttatgcctccactggattccaagattcccagtcaccatcacttcgtagtagagaacgtttccaccgtcattcgaatgaaaccaattcatctcattttctgatgaaatcagtaacatggaagtctcaaatatttcagcaccgtaatgttttgtcaaagtttccaaggtagccaagtatttcaccttcaggtcatgcgtggacaccgtgctgtcacaaatggtcttgttgttaaattcctttaggaaatccttgaaaacattatttatccgcatcctggtgagaaggttcctctgtctgatggacttattcaatgtttctggaatatatcgcttgtagctgatgtccttgggcagttctggcaactgcatcttcttcatcatggcatagtgtgagatggccaggacagccatccctagacactcgttctcaatatcatgtccatcctgctcggtct

SEQ ID NO: 384 - DNA, 549 bp, Homo sapiens
  misc_feature (12)..(12): n can be a, c, g or t
  misc_feature (14)..(14): n can be a, c, g or t
  misc_feature (372)..(372): n can be a, c, g or t
  misc_feature (377)..(377): n can be a, c, g or t
  misc_feature (432)..(432): n can be a, c, g or t
  misc_feature (459)..(459): n can be a, c, g or t
  misc_feature (473)..(473): n can be a, c, g or t
  misc_feature (484)..(484): n can be a, c, g or t
  misc_feature (495)..(495): n can be a, c, g or t
  misc_feature (500)..(500): n can be a, c, g or t
  misc_feature (527)..(527): n can be a, c, g or t
  misc_feature (543)..(543): n can be a, c, g or t
catgttttcatntnttaaaaatttaataaatattacttttcaaaatttattgccaagaacaacacatcaaagatgcatttgtatgttcatataacactaataggacaatacaaagtatcttcacggtctcaatggtgaaccaacaagattactctgttttataagcctttttgatcttgaacttcgtaatagcactttgatttcctcacttaaggcaggcagtgtactctatgggcaaatctaaacagtgatcttactgggacattttatgggttcaagtattcaactaggcttattaggaatactccctaaatgcagtaggattaaaaaaaaaaatcaaatctacaagtgggttcagtattatggtacggntgggnggaaaaggaaatcaggatttacaaggtaagggttgggggtggcttcccaggttcnccacattaatttggtatttttaattcntattccacccctcnccttttgggcnctggtagggcnaggcnccacctgttcccctaccgtttggggcnggtcccccgcccgtcncttttt

SEQ ID NO: 385 - DNA, 421 bp, Homo sapiens
caacatacgtttttattactcaaggacaacctggacgtcaccaatgcccagcttcacgggggcatgtagtgtgactcacggctgaacacaaaatcactgtgaagcctgtgctacagccctgggctacttttggacacgcaagaggacactcggttacatgaaacctgacttgcttctgaagacatgtgatacatgtcttttccctgaaaatgtttcccttccctgtctgccatgctcccaacttttctgccttccaggggcttctcactgtctgggtaactaggtcttgggcctagctagaccttgggtagtggcccctctgccacaatcagtgcctgggcctgaggctgagcttgtggcctccgaagcctgaactggctcggagctcgtctgtggcgcccagggatggcctggcttgcag

SEQ ID NO: 386 - DNA, 285 bp, Homo sapiens
  misc_feature (110)..(110): n can be a, c, g or t
  misc_feature (125)..(125): n can be a, c, g or t
  misc_feature (170)..(170): n can be a, c, g or t
  misc_feature (282)..(282): n can be a, c, g or t
tttttttgttttcataataaactttattgtgacaggcggggctgatccctcccatgttgggagacaccatgtggcaagtgacaaagctctgagcccgcccctcttgggcnacagtggtagggatnggggaaggggatggaccccatggctggggtagtaccatgactggnggcgggggaggcaaccagaggcctgctgctttggggaggtgcattcccccaaccatgtcccgacacctctggagttcaggcaaaggaccttccagtcctaacttgtccctgnatc

SEQ ID NO: 387 - DNA, 433 bp, Homo sapiens
  misc_feature (167)..(167): n can be a, c, g or t
  misc_feature (170)..(170): n can be a, c, g or t
  misc_feature (329)..(329): n can be a, c, g or t
  misc_feature (341)..(341): n can be a, c, g or t
  misc_feature (399)..(399): n can be a, c, g or t
  misc_feature (417)..(417): n can be a, c, g or t
  misc_feature (424)..(424): n can be a, c, g or t
cgggtggagcatgggacctttattcgttaagacatcaggctccagatatgaactttcagcagaagcgcttgccgggagcaaagggacagaaaagctgagatgaacagtgcctggcagcaatcacagccgggcaagggtgctccgagcctcgcatcccccggccgcgncangctgggaggtgcctcagaaggtgcattctgcttcctgcaggggcttgaaacaccaaggcactccagggatcctggagtcaaagcagcagccccggttgttgcactccttgggggtgacatgggggtagccgcagtccaccctgtccttggctggcacgncacactggtttncagacaggcccacgtactcctcagcaaaacttgaagggacagcaaaggccaggaccanccccagcaatgcagaagngctcttngaagccatg

SEQ ID NO: 388 - DNA, 273 bp, Homo sapiens
gtgctgagtggcggcactctacatcgagatcccgggcggcggctgcccgaggggagcaaggacagctttgcagttctcctggagttcgctgaggagcagctgcgagccgaccatgtcttcatttgcttccacaagaaccgcgatgacagagccgccttgctccgaaccttcagctttttgggctttgagattgtgagaccggggcatccccttgtccccaagagacccgacgcttgcttcatggcctacacgttcgagagagagtcttcggga

SEQ ID NO: 389 - DNA, 557 bp, Homo sapiens
tttatggtataaaaagttttttatttcaaaatgcaaaatggtggtcattgtaataattaataataataacataaaaagcatttatccttcctccctagtgcaaaatggtagacgcatttagataattcacacagtgttggaaatgtcatgacaatgcagtgctgcacagcagaaaactcaatcccaaactcctttggtggatgcttgtggtaggtcagttctagatgtcagcggtttctctgaagttaagtccaaataaaaaacagcacgtgctcctgcactctcccagcggagtcaggctcctgttcaaacacccctctgtctctcccttcattctcaggtctgtatctgtctactgcgtctcgctcccactcagctggtctcacaacagttcctaggaggcgtgctgcgagttggacaagaacaggcaccggaggaccgtgtcgtgctgcgtgcgtatatactgcagggattagttctaggagagcatgtcgctgcaggggtgcctgcagatcagcacaagatggtactggtccggagacgtctggcggcggtga

SEQ ID NO: 390 - DNA, 405 bp, Homo sapiens
caaattccaaccagaagctaaatacaattggaaactggtaagcactagttttactccaaaggagtaggatcattcagatttactccaataaaagtatgcaacccttaagcaaagcttttcttcatttaaaaggagaaaaaaaaaaaacctatacagtagtctttccttatgttcattgcacaaaatgagttctgcttttagaactttgacactcaatggttaattttacaatttaagattccaactttataaccttttttctactccaaaacacccttgtaaagtttttctttaggatggtgtaaaaaccagcatttctgcacaattcactggaatttttttctttgtaataaaaatctcttctctgtaaaaccaaaaacaaaacagaacaaaacaaaacaaaac

SEQ ID NO: 391 - DNA, 493 bp, Homo sapiens
cgcctcccccagaggtgtggcaggtgctgaagacccaccccggagacccccgcttccagtgcagtctctggcatctctatcccctatgaggcaccacgtaagacctcctgcccttagctctcttgctcacaacccaagaacctcaggacagaagcgagacaccattgctcctgctcagctcagcccggctgcggaggaacccttggcaggcagaacctggaggtgtcagaggctcaactcctccatctaaccagcaggctcccagagtccccggaagagcctgcgcacgtgaagcagagtgcttctagatggagagtggtcactggggaaaaggacctggccatcaccttccaatacctgctgcctgtctccctgacccatgatctggcaagttaggcacagtcagacatggacagttgatccatgaggaaaagatgctctcccacctaaggccaggaatctgagagcaggactggctgagctcccagggcaa

SEQ ID NO: 392 - DNA, 464 bp, Homo sapiens
ggatggggggaagaagtcaatggtgaggcttctctgggaaattctgcaggccttgtagttctctaagcccctctagcaacatgtggatatgggctttgatattcatggagtccttggtgaggctgttgctgagccttatgaaaacctatgagttcaacatctgtgaggagagagctcttacgatcaatgaacttgagagcttctgccagtgtcaactccaggaaaaaaccatatcccagggccacatagatgcgtgaagtatctggggaccactggtgtcaacgaagaaggttacagccccaaattccaccttgcatattataacttcccgatggcttagctttccttggagtccgctcaattgacattttctccagtttgaagggtatttggggccaagctggcgcaaaataaccgttgtccttggatgggtccaagccactctttgagaaaaaacccccccc

SEQ ID NO: 393 - DNA, 318 bp, Homo sapiens
  misc_feature (259)..(259): n can be a, c, g or t
  misc_feature (293)..(293): n can be a, c, g or t
  misc_feature (316)..(316): n can be a, c, g or t
ctcttcctctagttggaaaattagagaaatcatgtttttaattttgtgttatttcagatcacaaattcaaacacttgtaaacattaagcttctgttcaatcccctgggaagaggattccattctgatatttacggttcaaaggaagttgtaatattgtgcttggaacacagagaacccagttattaacttcctactactattatataataaataataacagctcggcccaggttactgtgacctctgacagatcaaggnaacaaagttattttcccctcctggggattacagnaacattgccaggacatttttttncc

SEQ ID NO: 394 - DNA, 415 bp, Homo sapiens
  misc_feature (172)..(172): n can be a, c, g or t
  misc_feature (230)..(230): n can be a, c, g or t
  misc_feature (365)..(365): n can be a, c, g or t
  misc_feature (382)..(382): n can be a, c, g or t
  misc_feature (393)..(393): n can be a, c, g or t
  misc_feature (409)..(409): n can be a, c, g or t
tctttatttagatatagcccatcttgttgcaaaacagatatctcagcaacatacaaaaataaagtacaatagcataaaaataaaaagattagggtaaaggtaaaagcagaaagctagaatgaagcgagtctagtaggagactcagcacaattggaaaaaaaagggtctcgantttgactttgagcttcccagcggccaaaacaaggaagaaaacatgactggttacaagnttcctaccaacagttagtctgggactctgggtacaaaaacagacctgggtttataccttgactctactgcctgttgggaggacgtggaccctgaggcagggttgctttaaggctctctggaatttgagggctcantcacctgtaatgggggngggattaatgnccggcctcgggggttncggggg

SEQ ID NO: 395 - DNA, 233 bp, Homo sapiens
atgttcatatccttcaaattcttctcttgtcaaattaaacagtgggaaagagaacttttgtggcattcactggtgaccctgactctgcttgcaagcatctttctgctgttgcacgttgtcgtcatcctctcagcgtcgtttcctaactggacctttgttggagagaatctccgtgcttcctgaaccttcaccagggtttcctgtttgggagtgggtggctcagttgcagtttg

SEQ ID NO: 396 - DNA, 336 bp, Homo sapiens
  misc_feature (75)..(75): n can be a, c, g or t
  misc_feature (322)..(322): n can be a, c, g or t
aatgtgcaggctattcaagttcaatagtaaaagctcaaaaatgaatgttctactccatgctgaaggagctgaaantgccttcttcatattttgcactttctggtagttcccctgttttttctaattccctaaaattgtgtgggtggagtggagccctgcagttggggggtaacatggaccactgattttgccctttgaccctgcacaatgacctttgcatcagccaaactcattgccatgacaactctttgtactgtgtccgtgccacagatctgttggtcacattgttaatagtaaagggggcaaatttgagacgggcaanttttacacattttt

SEQ ID NO: 397 - DNA, 541 bp, Homo sapiens
  misc_feature (535)..(535): n can be a, c, g or t
gatcaaagagagaatttatttacagagattttcaaatacaaacaaaatagcacttttaaattttttacaaaatgaatatagaaataaatgtggtacagcacagtacaataatggacaaaagaaaacacgatccaatgactggaaaatgtctctcattactctcatatcttcggctgaattctctcctatagtggacagaaagttgccccttttcttcataagaatatcatagcagaagctactcagagaaatattgcatattgtggaataacatggaaatacaaaggcttaactctaaaggtctgcataaacactgaaaatatgttgaggaactaaattagagtttatgcaggatatacaaaatactgatagtttggcttattggtccatttattaggcttaatgtatgttttataaagtgataatactgtattttaaatgtatattaaaaagaaaacagaggagaaatgcaccactaaacctcccagtctgtgcgataatccacgtttgtgcataggcgtgtgtgggggatgcntatgtc

SEQ ID NO: 398 - DNA, 409 bp, Homo sapiens
ttggtttgttttgccttttattgaaaaggtaagatcatgtgattggaagaacacaactgttggcttgggaagaggactttgctgctgaagtgttttctaccttctgagtgtgtttaaggcaggatttggagggaaggaccagcttagggagagtgtctgagccacagcgtcaggatgggggaaaccacatgggatccatcaagttccagttgaacaggagcaagatcagaacttaggagggcagtgtcagctcccttgttggctgtcaaggaacaccgatctagtagaaacccacttggttgtgacccaggtagaggtagatgccatacatttggagatatgcgtccttaaggaacctgacaagcagactgaagggatggtaagtgtgacagcctgataagttttctca

SEQ ID NO: 399 - DNA, 331 bp, Homo sapiens
  misc_feature (123)..(123): n can be a, c, g or t
  misc_feature (126)..(126): n can be a, c, g or t
tttttttggtgacagcaccgttttattcatgacaatctgcaaaaaaacaggtggatgggtcagaaagtcactgcaagcttacattcaggggctccacccgcagccaaagcccgccctcggcgncantgatcaattccagcttcctgcggggctcagtgtggtctggcaggaaccggaagtgcagcagcatcaacgccagggaccactttcatctccgccatggcaaacgctggcccgatgcagttcctggggccctgcggagaaaggaattaaaagccagaggtgacctcccctttgctgttctctggggtcaaagcggaaggggtcgtag

SEQ ID NO: 400 - DNA, 389 bp, Homo sapiens
aacagtgaaccatatttcaatttattgacattgtcaatttatgaacaagacaggatttttttttttcccatggaatgagatccttttcaatctgccataacatgtgcccacacatcttcaccttggaaatgtagcatttcaagctttagtcagggtctaggaggaaaaagaaaatgcaagttgctggctagttctctgtgttttcttaaaaactcaacatgaatataagaaataacttccttatagtgaactgtataactgtggctatcattcacattgccgtggctcagatgtaaaaagtgctggttcaagtacacaggcttagtcaagcaggcattttcctgctgagtaaaagtaaacactctcccagaataaagaaactactttgc

SEQ ID NO: 401 - DNA, 182 bp, Homo sapiens
agcttttaccagcatctaatgcttcactgctttttttccattgtagactttaatgcacttgaataaatacatggagttgttttttctcaaaatgaattcacaaataaagactgagatggtccaaaaaaggaaagaggaagccatttgcgttatttcacgttgctgagcctttctctcatgtt

SEQ ID NO: 402 - DNA, 486 bp, Homo sapiens
tttacttagcattattgtgataacagtaaacaggtgaaccagggccagcaatattgtacaaagatcttatgcttctgccagtagcaaccgttctctatgtttctccctttgtttttctcctcagaggcttcctacattatgtcagtgaaggaatcagtgattatgctttttataaaaattctcctggggagtggtgaggaggcatttttgctaaggcttcacctcttcccttcatctccaggggtcatcccctcaccttattgggcaaaactgcatcaatctccttttgcagtttctgctggacatcagggtgagtggccagttcatataaagtgaaggaaagaacactgctggtggtttcatagccagcaaaaatgaagattattgactgggctgcgagctccagatcagacagagctttgtgggactcagtttctttcgaattctgggagtcaatcatcagctgaaagaaatctagtcggtgct

SEQ ID NO: 403 - DNA, 378 bp, Homo sapiens
aaagaaataaagaaaacagtgacttatcccgctacccaagcgtgtagagccgcgcgctgtactgcttccgatatgtgccacagagcagcaacgagaagtggacagagccgcaatggttacaactgtaagaggttatttcttaaaagaaaaagaacacctaaggactgagtcccatatgcacttttgagcatttctacagcatgcgattctaagagtaaacccacccaatatggcaaacaatcaaaatttttaaaatttaacttagaaagtctgagatcattattttcaaaacattgatttgtacattgtttcatacacaaataattgactgactatccaagcacaggacaggcatctctcttgaaaacagaggttcct

SEQ ID NO: 404 - DNA, 412 bp, Homo sapiens
gcgcaagtggtcaaaagttgtcaaaattgtcctcattcctcgattgtctcttttttaccagtctcttgcccttcaaacagaggatacctggcctccacatcagcccatgtgatgttgccattggctaggtcttggactatgctgggcagctcagagatctctgctcttatctgccgcattgagtcacggtccctcagagttgcagtgtggggggtcttgttcactgtgtcaaagtcaatggtgacaccaaaagccacgccaatctcatcagtcctggcatagcgccttccgattgacccagaggaatcgtctactttgtgagatactccatgcctggtcagggcttccgataattccttgacaaatggcatgaactcctggttttggctcagtgggaggacggaacatttga

SEQ ID NO: 405 - DNA, 535 bp, Homo sapiens
  misc_feature (154)..(154): n can be a, c, g or t
  misc_feature (252)..(252): n can be a, c, g or t
  misc_feature (489)..(489): n can be a, c, g or t
tctccaaaattagtttttaatacattcaggtaggttatacaaagagttggtcccgaggcctgggctgcggcctgggccctgggaagtgacagcagccctgtgtagtgttttcaaagatcaggcgtggggacccacaccttggcctccaggctanaggaggagtgttacgtgcagtagcacccgtgggtgtgatcccaaccaggactgggtctgcctgggtgctccacacaccaccagggcctagcctggctnctgcccattgactctcccttaacttcctctgggccttggtgttctcctctgtaaaatggggtggagagagtggcattttcactttctcgcacattactgagcccacatcatgagccagactgtgggccaagcacaggtaagatgatgaagacagcaaaacaaggtcttgagttggtcccagcacgtccattcttcccagacagctcatgactccatggtatgagggatgggggtcantgggtgaagcttttacctgtttttgtaagagggaaaaacctcgtgc

SEQ ID NO: 406 - DNA, 442 bp, Homo sapiens
  misc_feature (1)..(1): n can be a, c, g or t
  misc_feature (6)..(6): n can be a, c, g or t
  misc_feature (48)..(48): n can be a, c, g or t
  misc_feature (329)..(329): n can be a, c, g or t
  misc_feature (413)..(413): n can be a, c, g or t
nttgtntttttagcaatgactcataaattctttattttggctaatacngattgcattcattactaccattttatttattacagctcagaggagagtcatttactagacattcggttgttattaaacactaaaaattaggcagagactggaggggataaggataagagaacaggataaggagagcagaaagacgctcaggagagtagaaagacactcaggagagaacaagagatcctgcccattcttattatgaggatgaactggctacaggacatgagtagcccaatcagatctaacttaaataccagcctctccaaaaaagttttccnataaagatcccctaacaattatttactggacaaaaaaggttgatatttctagaagagatgatctccgttgacacaaaagacccnacttaggaccccacttaatacatagatag

SEQ ID NO: 407 - DNA, 433 bp, Homo sapiens
gattccaaatgccccttttattaaaaataattgcacttaagatttagaatctcccaagtcctgtgaattttcctgagttcccaggcttgctcggggaccggcaggcatccagccctctggcgagccgggcagcggtcgcgttggggcagagcagcaggcgcgaacgaggagctcaggtgcataccccacacctccacctgagcacccccttctccggtgctgggaacagatggaggggggtggctaatactacccgcatgccggcaacaggtgaggagggcaaaccttacaatcttattaacacagagcagccctccagggacccggcccacagtgcgatctagggagaaagctctcctagacacgttgggggccagagcccggcccaggaggtggaaacaagcgatgcggcggcttggaatggttagtgccc

SEQ ID NO: 408 - DNA, 356 bp, Homo sapiens
tttgagtacaaattttatttaacaaaaaggtaacatgattcttccaaaataaaaatcactaccacctttaaagcttccattccagccctgcagatatgtatgcacgttactgtgctgtcagcccctcacacattccaggtggtccctgaaggtggggctttggcactgcagggatgcagggaaacctcaggtgaaaatgcacatcctaaattccttttccatttccacattccaatcagtgaaatgtggcatgacagggaggatctgtgaggtatgttcagggtagaatccctcaaagacacaggctttcatcatcatacatggtccagccatgaatctttgtttttttgcggggg

SEQ ID NO: 409 - DNA, 410 bp, Homo sapiens
  misc_feature (359)..(359): n can be a, c, g or t
gttaaaacatgaaaaaaaattttattgttttagacaaagaggccacttttggaaaataatacttttttttttttagttgaatcaggtgaagacagagttaaaatcacataggatttgcatttttaaaaaaggaaagcactaggattgttggcactggagtaactatttacactgaacagaggtttggccttttacataacatcgatacaatgcattttccaaagtctgagaaataacaaggttctgtctcgaatgcttcacagaggaggttcggatttggggacaagtgtcattaatgagggccatggaagttcgtcagcttcagagtcacatgcaatctgatcctgggcggttccccngctggggagcacttggctacggaattgaaagctaatggggaggggtggggc

SEQ ID NO: 410 - DNA, 517 bp, Homo sapiens
  misc_feature (461)..(461): n can be a, c, g or t
ttttttttttttttttttttttttttttttccatttaacatgtatttattgagtcatggctctgtactgttaggcatttgggaatacagagatgagacagacaaaggccctgcccccaaggaacttacagtctagcacaaaaacagaccaaaaaagtgtagtttcaatgacgtgtaacagagagttaagaaggaaatgcaaggggccatgggaagtaagtctttggcaatgacctgttcaagttgcttctgctgatcttcatagtccttcagatctacttcacgagctaaagccctactgcatgaccctcgacaagatcggatcttaatatcaatgtccacctccagtcgtttcatatcaaccaactgagctctaacatttttctgcagaagctggatatgctgtactttttctatgactttgcggcttcggacttcaattctgcttctaagatcctctgnaaaccgggtttaaggaattatcacggtaattggctggggaaaaatcgcccccaaaa

SEQ ID NO: 411 - DNA, 477 bp, Homo sapiens
tttttttttttttttttacttgacaaatgcagagcaattaaattctttattataaaaatctcaaaaatgtccacctttactggagaccaatcttctaaaaggtcaaaagcaatcctgctgtttctctctgaaagctaaactcctttaaatgagaatacgagaatacccagaattttattcccagcctttgtgtggaaaaggcagtttgcattcttaggaaacatctaactgttacctaaaccataaatatttctatctactccattcaacccaattaaagaaaacaaaatgatgagaaaaataggagccgaacagaaagaaaattcacatcattttctactattacgaacattcaaatggtgcttcaaattaaataattttaattatcattctagccaagatcatactaagtaggatctcctgacagtcccatatggcagggatttaacctaaaacgtggcactgaatgcttcgcca

SEQ ID NO: 412 - DNA, 504 bp, Homo sapiens
ttcggtgtacatctgatttactgaattttaaagtctgggatgttaggggggaagaggcgaggtgagcattgcgtgacgccgaggactaggcggggcggggactgcacctggctaggcacccccaccctgggcaacttgccacggaccccagggcagtgagtagtgacaggaggtagcccggggtgagacctctcacagcaagaagatggtgtggttgctggggcctccctggagagtgtcgtccctgcggcccctgggaagtgctccctcacgacggaaggtttcctgtcagtgcggtcccggggcctgatagtggcggtgggcgggtggggtcacctgtcctcaaggtcctgaatgcccagctctgccccattcctctgattcccagtggctgctagctggacccagctggtgtcctgggcatgaaggcagggccaccgtccccagcaggtgctgccctcctggccagctgagcatcctggccaccatcagcgtccaggtgcc

SEQ ID NO: 413 - DNA, 415 bp, Homo sapiens
tttcaaggtagaatgagaatttttactttttgacatggatgctttttctctgcagcagtacccaagttacagagaagaaaagcgtcgctgtgagtaccttcaccagaaattgtcccacattaaaggtctcatcctggagtttgaggaaaagaacaggggcagctgaagttatcaagggaatttttgagcctctgcttagtgaaacacaaaggaacaaagcagctataaactaaatagaatgcaactatctgcttttcttatgctgaccactggagtccatggtggcaagtagagagctgctctaggttcttgaggtttggttttcattattaatttttagggtatgggcactgtgcaaagactccatagctgtgcctaggagtctaggaaaagtgacagaggcttggctttttta

SEQ ID NO: 414 - DNA, 415 bp, Homo sapiens
  misc_feature (306)..(306): n can be a, c, g or t
  misc_feature (311)..(311): n can be a, c, g or t
  misc_feature (333)..(333): n can be a, c, g or t
  misc_feature (347)..(347): n can be a, c, g or t
  misc_feature (384)..(384): n can be a, c, g or t
  misc_feature (393)..(393): n can be a, c, g or t
cacattcctacaatcaagtttattactcaaagcaaaagttgtccatataatacattggtcgtcaatttttatttccacatggttacacaggctgaatgactagctcacaatcccaggaggtattataagttttgctcttcaaaaaatggtgttactgttgtaaggggaaaagtcctcaatgacaaagaaatgacactaatgaaaacaaaatcaagaatgatccactggtactgcaggttacagagaagctgtcagtgagcagttccccacctctcggaagccaaggggatcaagggcctaaaattnccttnggaaaattcaaccagcacctgnaacaccatggcttntattaaagggccaaccttgcaaattcttcccttctgngtccatggntggccccaattgtggaagggat

SEQ ID NO: 415 - DNA, 483 bp, Homo sapiens
  misc_feature (16)..(16): n can be a, c, g or t
  misc_feature (101)..(101): n can be a, c, g or t
  misc_feature (159)..(159): n can be a, c, g or t
  misc_feature (162)..(162): n can be a, c, g or t
  misc_feature (321)..(321): n can be a, c, g or t
  misc_feature (353)..(353): n can be a, c, g or t
ggaagcagaagaaagncccttcagccctgacagagctggctgcctctggagagggctctgcatcagtggctatctcagccggtgtaagaggggcaagcggnactggaagaagctctggtttgtcatcaaaggcaaagttctctacacctacatgggcanttnaggcaaagtggccttggagagtatgcctctgctaggcttcaccattgctccagaaaaggaagagggcagcagtgaagtaggacctatttttcacctttaccacaagaaaaccctattttatagcttcaaagcagaagatacaattcagctagaggtggntcgaggcatggaagatgcgagtgtgttatagnagttataagcatgtggacttgtaacaaattcttaggtaatatgtgaatgcttttagaagctaagctgtggtcaactcatccggacacaaactggattcagaatgaggctgacttttttgtataacggcct

SEQ ID NO: 416 - DNA, 476 bp, Homo sapiens
ttttgagggggcggtgtgactgtatttaattgaacctcaagtggattctgagaggccagagtgtgacttctcttgccctataaatcaggtcccctgcagcaagtcagctccatctttcacagggctgggctggctggatgcgctggcagccccggctggagtaagagcctggctgtcagcacgcaggtgccctgcacgggacctggggctgggacagggcaccaggcaggcaggaggctcaccccggggtgcagaaggccccaggggtagcagtttacagaagatgtctcagtcctgtaagtaacaaacagaaacaagccccagcgcttcccggtcccctccccgtggcccgcaccaaaccctaagctgtctcctaaaacttcagctgtttccaccaccacgctgacgaccagaaagacaaaccaaaacccatatgaagggcaatctttcaattgcttaaaattaatcagtgcaaa

SEQ ID NO: 417 - DNA, 399 bp, Homo sapiens
ttaaaatagctaaataaatctttaatatttctaattgcaaatgtacagaaattgcacagccacacagagtcttagaacaccaacagcttcctctgtacattattacatagttaaaagtcgcagctggtagggaggagctccagcccaaactccaacgtttgcattttttccttttcacatacttacaaaagaggggagctgggacgcggtgtgggagctggggggctttgtggctgagtgtgtagaaaagagagaggctgtttccctggacagtctggctcccgcagtcgtgcgggcgcagggggaggtgtacctggggcagatgctctgggggaccggggcgtgtggagctgtagcctcggtcctccacccccactttctgggcagtcggaaagagtc

SEQ ID NO: 418 - DNA, 397 bp, Homo sapiens
ttttgcttataattccagaacattttaattctacagagctttaataaaaagcccgacagtttccaaatgttcatcaaaaacagaatgaatatcagtcccatcaataagggggaaaaaaaaaaaaaaaaaaaaaggagagggtgagagatgtaagagatgaatgaaggttgacaactattctcctttaaaaagagaaacactgcttcctcaatgtcactgaaggatatgaacaggcaagaggaaagtaactgtccatatttgccttatatacagtattgggtaattaaatgccagttgggctgtttaggaatggcttgctaaaacattgaaaaaatgaaagacttcatccttgtcgtagactgccacttcagtggaacattcagtgcacatgactggg

SEQ ID NO: 419 - DNA, 542 bp, Homo sapiens
  misc_feature (540)..(540): n can be a, c, g or t
atgatagccaaaagcaatttattatagtttagcctcaaaaaaataaaaataaaaaaattatccagtggttatgaggagtctaggaaaacctgtcccagtaatgccaacttggaggtgaagggctgactggggcagctgagaagtgggaccttctgtttggcaggcttcctctcccttgcctggtcatggttttctggtgagaagagtgttcctggccttgctggaggttcccatggccccgaactaacagtgtttttctgaaatttcgacctgctccgtttgagagagtagaattccctcatcaagtcctccacctcccactgctcttccttcagcctctggagcagtgcagggcggcagggtcgatggggtgagcttctgtgttgaagatgtaccccccagcccccaggatgcactccccataggggttgatcaccgcgtcgaaggtggacccattgttgtggatgaagttggttgggtcaaacaggaggtagaggtatttcacagtctcggccaggaagaacgactcatgcgcctcgngc

SEQ ID NO: 420 - DNA, 528 bp, Homo sapiens
  misc_feature (442)..(442): n can be a, c, g or t
  misc_feature (475)..(475): n can be a, c, g or t
  misc_feature (504)..(504): n can be a, c, g or t
  misc_feature (513)..(513): n can be a, c, g or t
  misc_feature (520)..(520): n can be a, c, g or t
  misc_feature (526)..(526): n can be a, c, g or t
tttttttttttttttcacatttgagcagagtttattagcatttttgaattatcagagataatattagattacagtatcatatagtattagataagatgcaccgttgacacaggtacagaagtttccatatagttcaactgattttttatttattttttatttttttgagatagggtctgactctgtcacccagggctgggagtgcagtggcccatctgaggctcactgcaacctccaccttgcaggctcaaacgatcctcccacctcagcctcacaagtaggctggggactacagggcatctggacaccacacccaggctaatttttgtatattttgcaggaggacagggatcttggccatgtttgcccggggtgggttctccgactcctggaggcccaaggtaattttgcccccctcgggccacccaaagttggtgggggntttacaggggattgaggccaccatgtttcgggnccaggttcaattggaatttaggggttttngaaattaantttggantttccntt

SEQ ID NO: 421 - DNA, 468 bp, Homo sapiens
tgattcaagtatctgaaaacattctacaatggaaactgttattagatgctgcatgtactgtgctatggaccacgcacatacagccatgctgtctcagaagacttgaaatgccattgatagtttaaaaactctacacccgatggagaatcgaggaagacaatttaatgtttcatctgaatccagaggtgcatcaaattaaatgacagctccacttggcaaataatagctgttacttgatggtatccaagaagaaatggtgggtgatggataaattcagaaatgcttccccaaaggtgggtggtttttaaaaagtttcaggtcacaacccttgcagaaaacactgatgcccaacacactgattcgcggtccaggaaacacgggtcttccaagttccaaggggctggggttcccaacgatctagttcctgtgctgtaatcaatagggtcctttggactggatagggagcac

SEQ ID NO: 422 - DNA, 455 bp, Homo sapiens
tttttcctcttaaattatttttcattctgattatattacaaagaaatgagctgtggaggtttggcactgttttccatcttaacagttgttctgtattgtaagattttatatgtgattcataatgtactactataacaagacacagtttttatatattactggaataatgcaaagaaaatgaattttcctttgggtccagtaattgtcaaaggaatgattgcagattcagaaaatgtgctttgtaataaccctgttaacataaagtatacactgaggaaaaaaataagtatggcacatatatggaaggattagttgtattagcaaggcatttcagggatggttttggttctttagactaagtaagatacatccaatttagacccccttcaaatccttagacaaatgggaatcacttggtaacataaagattattttggtgggcaggggctgatttc

SEQ ID NO: 423 - DNA, 375 bp, Homo sapiens
  misc_feature (236)..(236): n can be a, c, g or t
  misc_feature (330)..(330): n can be a, c, g or t
  misc_feature (361)..(361): n can be a, c, g or t
  misc_feature (373)..(373): n can be a, c, g or t
tcaaaatctcatcagatttatgtcgtggtttccgaagatagtaatgatgacatgctttgaaagctaatgttttacatttactcagaaggctttcatgaggttatgacatgggcagatgatttaataagacagttatggtttcatgtgaaactcctttgcagagagatgcccatacacactgatgggcatgctgagtccctgggtctaggtgtgttaaggtaggggtaggggctttncttcccatctgattccctcccatgggaacatgcataagcttctagctgttgcctaagcatggagggagtcccattgtctttcttagggagtccnttgaaggagtttttaaacagcccttttaccntcacaggtattnga

SEQ ID NO: 424 - DNA, 366 bp, Homo sapiens
  misc_feature (342)..(342): n can be a, c, g or t
ttgagggtaaaatgggcattttattacacacagtagcataaatgggataagaataaaatctggagcgtctctgtaccaattctccaattaatagctgctcaacctaaatatctttgtcttagtccagggtgagaaatgggatctcatgtaaaggaaacctggggtccagtccagtcctactgaatgctatttagtctgagtaaagaaatgtctgagggtcaaagccatttgggacggtctccctggggatagagaggttgtcctaaataggtccatcagaaaagccaggaattcctttctcaggcccacaaggcaataaaggccatgaaggcaaaacccagnggctacacagctccactttagctt

SEQ ID NO: 425 - DNA, 367 bp, Homo sapiens
  misc_feature (189)..(189): n can be a, c, g or t
  misc_feature (204)..(204): n can be a, c, g or t
  misc_feature (215)..(215): n can be a, c, g or t
  misc_feature (296)..(296): n can be a, c, g or t
  misc_feature (316)..(316): n can be a, c, g or t
  misc_feature (320)..(320): n can be a, c, g or t
  misc_feature (341)..(341): n can be a, c, g or t
ttcaacaagtatttattgagtgtctattatgtgctagatactgagacacatcagagaacaaaaccaaaagccctgcccttgtcgggcttacagtctagcacttaccgccagttaacctgcaggctacctggggccccgggcaagtcaccgcacctctgtgcctcggtcctcagctgaccaatgggagantaagcagacctgggntcagacatgantcatgtgcttggtgtactgcagatgccaaactgcatccccacaacccaccacgtaggacagcagacagggctggaagttgntttttaatgataaagtacantgangggagggcagagaggctaagnctaggctgtctgggggtgctgtgggt

SEQ ID NO: 426 - DNA, 426 bp, Homo sapiens
  misc_feature (121)..(121): n can be a, c, g or t
  misc_feature (132)..(132): n can be a, c, g or t
  misc_feature (319)..(319): n can be a, c, g or t
  misc_feature (344)..(344): n can be a, c, g or t
  misc_feature (363)..(363): n can be a, c, g or t
  misc_feature (379)..(379): n can be a, c, g or t
  misc_feature (384)..(384): n can be a, c, g or t
  misc_feature (393)..(393): n can be a, c, g or t
  misc_feature (402)..(402): n can be a, c, g or t
  misc_feature (416)..(416): n can be a, c, g or t
agatatggataacatttattaaatagcacaaacaaagtataggtcactaaaaagctgaaaacaaacaactgaattctatagtaaactcttagaaatgccattagaaaccaataggacaaantttaaattcanacaatacttaatgagtgcctgttgtgggcaaaacaacaacaaaacaaactataggggatattacagtagacacagaaatcaatattaaaaggtcacactggccaaaaaaaaaaatatgcttcaaagcattttcatcctttaccactaccagatattcaattttctgccatcaagaatctcattgagnacttacgagaacccatccatgggtnacatggtccagaagctgcntgtttatgtaagaaanccatnccttcaggntgatttccncacaggatgactgnaacatttctg

SEQ ID NO: 427 - DNA, 270 bp, Homo sapiens
cgtgagtcaaagtctgacctttattttcaacatctgttcttggtgttaagctatcttttgtaggaaatagtggggcacactactcagagacattatttagcagtaaagaaagacacaaataacaatgataaaaagacatcctaaaatggtgaagttgccatgacaataaaggtcatagaacctggtagtgtcaaatttaaccctttgaggactgtaattgcatttctgtgcctttcacttgaaaaaaaaaaaagaagaaaaaaaggctta

SEQ ID NO: 428 - DNA, 409 bp, Homo sapiens
tttcttgaaagcaccaaattttaatatctaagtcaattattggggaaagaaacaccatcaagatctttccttcagcacaaaacaacgatgttcattcctccaaacattcaaactgaagatctaccaaaacaaaaacaaaaacaaaagcccacattgaaataaaaaggaacaaaaatcacattccagggggggtcagtgcattcagcagtcttcgctgtgctgtctaaccatccttcagctgactttcaaaaaaataacaccctaagctcatcaaaatacagattttccatttgctttttaaaattaaaaataatagtttaaaaaaaggaaaactttgaggaattcacaatcaattgcctgactcattctgatgtcatgtacagcatatggaggtcaggaaggctatttg

SEQ ID NO: 429 - DNA, 497 bp, Homo sapiens
  misc_feature (477)..(477): n can be a, c, g or t
  misc_feature (490)..(490): n can be a, c, g or t
gactggaagaattaactaaaaatacaaaattagccgagtagctgggactacaggcatgcgccaccacgcctgactaatttttgtatttttagtagagatgggatttcattatgttggccagctggtcttgaacttctgagctcaggtgatccacccgccttagcctcccagagtgctaggataacaggcattgagccgccgcgcctggccaaaatagcataatgttttaagaaagtttacgaatttgtcttgggccacattcaaaaccatcatgggccaagggttggacaagctagccttaggtcatgtccagaatgcaatttaacaggaatttcaagcaaaactaacaaaaaattaaatccacaaaaaaatatcattttgggtaaatgcactgtctcacacactttactactaaggtcccattccaaaccatgacgaccctttacataaaattagggcattctcaccaagtttctnaagatgatttctnaacatta

SEQ ID NO: 430 - DNA, 261 bp, Homo sapiens
atatagaaataactttaattaaaaaacttacatagaagattataatatcagacgtgacaaagatttgagtttatttgcctggacaactttgggtttgtcatggcttttgttttctttttctttaaaaataaatgtacagtaaaactacaagcaaaagtttgtcagtattgaattgaattttttaccccttaaaaggactagtataatttccaatctctaacaaaaacttagtgtcaaatctcacagataaggccaaatggc

SEQ ID NO: 431 - DNA, 437 bp, Homo sapiens
  misc_feature (248)..(248): n can be a, c, g or t
  misc_feature (395)..(395): n can be a, c, g or t
  misc_feature (408)..(408): n can be a, c, g or t
  misc_feature (421)..(421): n can be a, c, g or t
ttccaatgcaacttgcaccaaagctttatttgctattttcatagtctgaatgcaacatctttgtacatgcaaaggtcatcttgttttattgcagtcgaccagatttccaactgctcttctgtgcatatgaaacttctttacagttacaaaatataaaagcacttgtagacgtccaatactctgtgaggtctggtaagccccatttgtttttacattaaaaatataagtttttctagatgacttctcangtcacacggttagagattctttctgggactggataaagtgcctctcgtctgccttccggttcagaactcctagagcttgtgaattcctaaggcaattgcaagaacaccgcaggcaggaagcttaactttcctacacaaagaactcgngctccttttctancgtgactcaaagntctgagggaagggacc

SEQ ID NO: 432 - DNA, 574 bp, Homo sapiens
  misc_feature (254)..(254): n can be a, c, g or t
  misc_feature (355)..(355): n can be a, c, g or t
  misc_feature (455)..(455): n can be a, c, g or t
  misc_feature (467)..(467): n can be a, c, g or t
  misc_feature (491)..(491): n can be a, c, g or t
  misc_feature (528)..(528): n can be a, c, g or t
  misc_feature (540)..(540): n can be a, c, g or t
  misc_feature (553)..(553): n can be a, c, g or t
  misc_feature (560)..(560): n can be a, c, g or t
tttttttttgtcaaatctcatctctgttctcctagttttcacagaaatatttacaggaataaaggttgaaacaaaagtacctaatgatcatctccatccatcgaaagattgctcagggataagacactcaaacaagggcttgtgatgaggatggaaaagacaaagcaacttgaagagaaaaaaaaattcttttaaactcagttcatcctgcaaaatgggacataacacatgcatataaaggtttgactttttanttccacttttttgcctgatcgcagggaagatgggcatgtgggctggcccttcctgaagccttgctcctccaccactgggctaacagacagggcctccgggngggccttgcaaggccggacagtggaccgcagcccacttccccacatcctttaattcaggggccttcatggcagtttcattccccacatttaccccaaacntaacgtcgtagntgtttacacgtaggtgtgttggcntctggtggttttgggcattgacgttggacgtttaggntttttggggccnccgagggaggggnccgtttnggtgggtttgtcgg

SEQ ID NO: 433 - DNA, 370 bp, Homo sapiens
agactcaagatgcattttatttaatgttgacatcagtacaaacttaagtttctattttacaaaacatgctaattcctttaggtaacttctagttcttaatgactaaaatctctagtggagtttcactgaacagacttcttagaggaagaaggaaagtgtgttaatgaaaaaagtaatacttatctaggaggtccaaaacagagaaacttctaaagactgtcacagaaatggctacaccataattaagtagcgatataaagtaagaagtgacaggaaagaacaattaagatagaggagtgtgggagttcataagatatatatactgacatcttagaaaagtctgatcacaagttcagcaaattatcttttc

SEQ ID NO: 434 - DNA, 463 bp, Homo sapiens
actttttatatgtttactaacattaaactattttcaatgcaggaaataaatatttccccaaagaggaatcccccctcaattactttctttcagacttaacaaattggagtagatgtggttttgctcattcttttatctgctggcaactattttaagtctcctgtgcaaggcagattccgatgacctcgggaaagtcacaggacctcagtttcttcaatggtaaaagcaaaggcagtggtttctaccgtcctttctcactgcaccattcagcgtcagtgccctcatgagaaacacacccaaagcccagtgtgctctaccccaaaacttgtgaaatttctagagtctcaaaaaagtgaatatgtttaaggcagtataataaaagccaggtggacgacagttcctaaagttaggctggtagtggcgtgaacaggggtcttttgggccaccctgagacccgccccac

SEQ ID NO: 435 - DNA, 510 bp, Homo sapiens
  misc_feature (510)..(510): n can be a, c, g or t
ctatcttaattcattttattctacaaaatgctactcaactgaaagtggaaatgctaacccccctcccccaaaaaaatcgcaagggaaagaagttttaatatgttctttcttccatagcagcaagctttttctaacaagctttctttagtgcaaatactgtaggcttgtattacatatagtaaaacaacaaaacaacaacaacaacaaaaaccaccaccagaaaggcttccaaacaaagctactcctcaattttcaaaactatacaaagattttgagcttgcggttctgcctggaaggtctatttaggagactctccaatgggaccatttcaccattacttaaaaaaaaaaaaaaaaaaaagtgcccagaaaggtaattaaattccccatagggccatatgaaccatatacaacttgtttgcctccagagtcttacagctgactttactccacgtcattaacatatctcaaatacagatgcacaaagcttattttctactatacaccaaan

SEQ ID NO: 436 - DNA, 438 bp, Homo sapiens
  misc_feature (16)..(17): n can be a, c, g or t
  misc_feature (199)..(199): n can be a, c, g or t
cgctggggcagccggnngcagccggggcagcccggtcaccccgcccccaggcccacactaagggtgtccgcggcctgccctccaggcggaggagcccggactgcggaaggatggagctggccgccggaagcttctcggaggagcagttctgggaggcctgcgccgagctccagcagcccgctctggccggggcgactgnagctcctagtggagacctcgggcatcagcatctaccggctgctggacaagaagactggactttatgagtataaagtctttggtgttctggaggactgctcaccaactctactggcagacatctatatggactcagattacagaaaacaatgggaccagtatgttaaagaactctattgaacaagaatgcaacggagagacttgtggtctactgggaagtgaagtaccctttttcccatt

SEQ ID NO: 437 - DNA, 508 bp, Homo sapiens
  misc_feature (428)..(428): n can be a, c, g or t
  misc_feature (468)..(468): n can be a, c, g or t
actaagttataaaaaaaaaaaccccatcaccaaagacacctgtgcacaagtgtctgtcccttctgtcaccaacctagggcactacacccttcccaacatcatgaccctactgccaggtctacagattttgtaacactcaaagtgtcctgcattaaaaagcacgtgtctatttcctacgtgaaggggccaagggagccctggtggccaaatatcttcacccaggactgggagggcggcctcgatgacaaccaaggggtggatgctgacactccatcccaggacaggtggctgggtaggattccctgagcccctgacagctgggacatagggccaggacttgtacccgaggcagctgggcagtgggcagtcacattccagtaggccctgaggaatccccaaataagtcacgctgggaggaaagtgagacnccaaaacagaaacatgccctgccatccgggcgtggctcantctgtcttcgcgcagggctggttggcatggtgctacactc

SEQ ID NO: 438 - DNA, 425 bp, Homo sapiens
  misc_feature (419)..(419): n can be a, c, g or t
attgttactctagttttaatggtttcacaaatacaaaagttgctagataagcagtaccaacatatctaaatctccaatgatgttcaattaaaattttatttatagactcatacactcagcaaaaccactcatttaataagtccaactgaaataaattcttattaataaaatacctatattgaaagtaatatattgtaagaactctaccttaaattgaccatggggatgaactacaatgtcataaaatatgagccaaaatgttcactcaataattttaattacatcacaattaagcccagaactatgccttttttttggtgtaaggctgaataaggaccgaaactggatggagagaaaattgctttctaaagcctcatttactggcaataacttaccttatgcaataaccaacatcacgngactgg

SEQ ID NO: 439 - DNA, 386 bp, Homo sapiens
tggacagaagatgtgggtgtaggcagttttgataaagtagatgctccattagcatcaaatgatttctttggctggtgatcagactgtagcgtaaatggactagaaggaacagtgcttggggtagcagttggatgaaccactggtttgatggggtgctgtactggcgtagaactactgtgagtctctgctcttggcagtctgtagtctctgtcattgtgtctgcttgtttgagacaaaatattctgtggggagcaaactactgggcatcactgggaatgcttgtcttccattccactgggcaaacccactagtgggctgttgcttgcatcacctctcttctgtaatccctatcttttggggaagctgttgactgccatcttgtttgc

SEQ ID NO: 440 - DNA, 310 bp, Homo sapiens
  misc_feature (163)..(163): n can be a, c, g or t
  misc_feature (189)..(189): n can be a, c, g or t
  misc_feature (235)..(235): n can be a, c, g or t
  misc_feature (239)..(239): n can be a, c, g or t
  misc_feature (264)..(264): n can be a, c, g or t
  misc_feature (272)..(272): n can be a, c, g or t
  misc_feature (286)..(286): n can be a, c, g or t
tgtgtgtgtgtgtggctgaaaacctgttatcaatttcacatgattcagtctaacatgaaataaaacaggatgcactgaaagggcagagaaacatcagtaaacattgaaaatatggcaggaaaagtaaaatggtcgatacaaagttggaaaatacagtcaagantctccctgagaaagtgtaagaaagancagggagacaggcaggaagggaaagaaagaaaggaaagttgaaggnttantccagaaaagcctacatctgactantacatttnccagaaagaaaaancaaatcagaaaatgggtggggaaa

SEQ ID NO: 441 - DNA, 280 bp, Homo sapiens
  misc_feature (122)..(122): n can be a, c, g or t
  misc_feature (216)..(216): n can be a, c, g or t
ttatgaatgaaattctttgtttttaatttcacacagtttaaaatacaatatgaaatcaggctacagtatataaaaaactctccagcaaaatgatgtgccagcatcagctactaaaataaacnaacaaaaaactccgccataagaatttttttgcatttttttttaaaaaaacatcgacacttacatcgctacatctctaagctacctcagttctgntttttaaaaagcacctgcttttcctttttttcatcttacttctaaattttcagcttttaaaaaa

SEQ ID NO: 442 - DNA, 435 bp, Homo sapiens
  misc_feature (7)..(7): n can be a, c, g or t
  misc_feature (10)..(11): n can be a, c, g or t
  misc_feature (420)..(420): n can be a, c, g or t
  misc_feature (431)..(431): n can be a, c, g or t
ccagtanctnnacataagggaaattaatcagttaatttctgctgacttaggtttcctaaacagcttttagttctcaaggcacagctgtggtaaaaacagagcaaaacacccagccatttattggaattctgcagtacaaaataagcacatgtctctatataatctagtaacaggatagcaacagttaaactgtctcaaacaacagatgtatttgcttgattttccttcctaacttcttttgcatcaggaccgcaagcaaagagcttgtttcccagagtattttggggcaaatcgggaaatacataatgtgggcccattgccacaaaagggaggactggaaatcaatacggaggcaaggcccaaaaggcttcagggatttgggagccggggggtggcccatggatggaaatgccgggaggntccagggaggntagg

SEQ ID NO: 443 - DNA, 393 bp, Homo sapiens
gcaggttcccaataatcggtaagttaataaaatgaatatattttgatggcagaatgttgaaagacaagaaactaataaaaagtacttgtttttagctggaactagcatttggaagtaatgctagccagaggtaatttccactgtgaaatgcacactcaaagtcctattgtaatattattttaagggtcttaggaggcccctcagaggagactgcaaggtcagggctagagtatgagaagtcctaagggtttttgtattttgttttttttttcctataaaccctgaggttgaaagctctggatagctcacctaaattactttcctctaatctaacccctcacagcctgaatttctgagtattgcttgaccagtagtgacacattcctgaggcac

SEQ ID NO: 444 - DNA, 466 bp, Homo sapiens
  misc_feature (422)..(422): n can be a, c, g or t
  misc_feature (459)..(459): n can be a, c, g or t
  misc_feature (464)..(464): n can be a, c, g or t
tcaaatgcctctttcaaagtgttttagaactattccttgctaagacagtcttagctggtcaatgtgcacccatattactttagagaaaaataagacatcagtataaaaaacctataaacccaaagaccaggagaatattcccacatccataattgagtgcagcttagtaccattttgaggatgagagaaagagactatatactggaagcttcagagccttctcaaattttccagtgactgttatgcaagaaagctagcattttccaaaaatcaaagctatttgccattcattttctaaaattccaaatgtccacttctcgattaaagttcaccctttacaatgggtacatatggagtccaaagtcaatatttcctcaccgaagcaagtgctttccccagagcatctccagtctgggagctgncggctgccccgcttcctctatttgccattatactggncggtncc

SEQ ID NO: 445 - DNA, 449 bp, Homo sapiens
  misc_feature (289)..(289): n can be a, c, g or t
  misc_feature (408)..(408): n can be a, c, g or t
  misc_feature (431)..(431): n can be a, c, g or t
  misc_feature (431)..(431): n can be a, c, g or t
tttctacttcccatccttctcaaagagacaccagtcagaaatatagatatgcttatgcttgcttggtgtccttgattataaatagtccaaacatcaggaaactaaaatcaaggtgattatataactcctaaagatggaagttgtcaaaatacatcatcacaaaacaaattttaaaaggctattttaaatacaagattccatcttcactaaactgccccttagatcactaagataatttagcatcaaaatcagcttagataatcatacgttacaaagctgccaccagcantttacttagttctaaagctttccaaaaaacctcagccaacttggacactttggatctcacatgtccaaaaagtggtccagggttgatcagttagccttttaacagaagaatttgctccnggatggagtggcagctataatcntatgggaattttagaaca

SEQ ID NO: 446 - DNA, 436 bp, Homo sapiens
  misc_feature (233)..(233): n can be a, c, g or t
gaagtatacttccaagcaaaatttattagatgtctattcaagaaaaacacaatgacctttgcttgtaagaattcaaagtcaattacctggaagccaggtatgaatagttttttcttttaaaatcagatacagagagtagaaacagtaatttttcttaaatatgacaggcaacagatattgaagtcttttctcataaatggcatcaaagagaattattcatttatcagcaaagngcatgcagttgacttaatttcaaacctgaagcctttaaaatatgaagctggttatgaacttgacagaaatcaaggtaggctactcaacgatgtttctttaccttcttcctaatggaaattcccttgtcatcagtcagtagatatgtacatttcatttgggcttctacggatctttttaaccttcataggatttttggcataaa

SEQ ID NO: 447 - DNA, 595 bp, Homo sapiens
  misc_feature (344)..(344): n can be a, c, g or t
  misc_feature (372)..(372): n can be a, c, g or t
  misc_feature (424)..(424): n can be a, c, g or t
  misc_feature (475)..(475): n can be a, c, g or t
  misc_feature (511)..(511): n can be a, c, g or t
  misc_feature (551)..(551): n can be a, c, g or t
  misc_feature (551)..(551): n can be a, c, g or t
  misc_feature (556)..(556): n can be a, c, g or t
aagtaggaattaattatttattttatgtcttaatctatttgataaagaagactacattataataatctcaaagatcatattaccaaaggttgcccacttgagcatattttcattttgacacagaaacaaaatttagtacaacctttcctagttcccatgtcttgattttcatcattacatgcacagcagacctttacctattgtgataccagaacacatcattgtctttggttcccttcaaagagaattttattgttgttttgtattttcaagtccttaatagttcttgaaactcctagttgttttcttgttgaaagcagacacacatttagtgcacggcttantttacctttcgggtgaaagatcagatgnttttatacccttcacttgatcaatatatttggaaagaatgtttatccaaagnctatgtcactgcttcctacagaagaatggaattaatgcctagggggatggnacctccacctacaactttttgagggccatccattanggaatttgggttagcctcccgattaaccattaattgatcnagttnaacatggtacctaattagccaatgtgaggacccaaaaaa

SEQ ID NO: 448 - DNA, 350 bp, Homo sapiens
ggattgtgatgtaatctttatttcttactctgagctccagttagaaaagtttgacaatcattgttatagagctatgttcacacagtggagactttctgactcactgtgagctctgctgtatctatgcgctccccggagagggacaacttgctaaggtacagtcctgtccattggcatggatatttactgttccacatgttgggaaaaccatgtgcaataaaaatcaaacatatgaaacaatggctgtcattgtaccacagtatacattgtatcttggtgaaggttcttaaattactccttggagtttcctaattcacttcaggaaggatttgttgtgttccgtctttatg

SEQ ID NO: 449 - DNA, 395 bp, Homo sapiens
  misc_feature (274)..(274): n can be a, c, g or t
  misc_feature (378)..(378): n can be a, c, g or t
gccgatgctactattttattgcaggaggtgggggtgttggggggaattaagaaaagagaaagaaaggaaaaagggagaaaagaaaagggaaaagatgcaaacacctagagcaactttgcttttgaaaaaggcatctgtgcagagcccccactgaatttccattcctgaaagtgctctttataaatgtgtataacaatagcctagaggaaacgtacaagtcagctgccaaaggagtggtggcgtctgtctcagtaaactcaagattgtagaggtnggggtcagcggagaagggagggcagcattttgcatttaggataccaccacctccccccatctcattggcttaataattaagtgagaagaaatctgagctactgnccaatgtctgcggacct

SEQ ID NO: 450 - DNA, 410 bp, Homo sapiens
catgctaaatttttatttcaatgttatgcaactgcataagtataaatattttgttcaatatacaacaattatgacgtccataaggaatttcttagagaaaataagactgcaaacactttattgcacagatcctaacaaacttttaagctggtaaatctacagctgggagtactaccaaggagcacatcctacaatcacacagagactgaccaaatagaacacaatgaggagaatttctaccagctgattggagaggtttacaacaacaaacatgtaatacatgaatgcaaccttaagtactctttactcatttataatgaaaaacatatttggcaaaaatgatgatacactatacaaaatatacataaaaatatcatttgtaaacaaatagctagttgtgctttaaagga

SEQ ID NO: 451 - DNA, 374 bp, Homo sapiens
ggtcacctctagcacagaggcctgagtcatgggaaagagtcacactcctgacccttagtactctgcccccacctctctttactgtgggaaaaccatctcagtaagacctaagtgtccaggagacagaaggagaagaggaagtggatctggaattgggaggagcctccacccacccctgactcctccttatgaagccagctgctgaaattagctactcaccaagagtgaggggcagagacttccagtcactgagtctcccaggcccccttgatctgtaccccacccctatctaacaccacccttggctcccactccagctccctgtattgatataacctgtcaggctggcttggttaggttttactggggcagag

SEQ ID NO: 452 - DNA, 513 bp, Homo sapiens
  misc_feature (445)..(445): n can be a, c, g or t
  misc_feature (466)..(466): n can be a, c, g or t
  misc_feature (490)..(490): n can be a, c, g or t
ctcccccctccgttatcttcacctcccttcataccccagggtaacatacccctagggtaactaataaaaaacaaaacccacccaaaagtttctttaaaaaaaaaaaaaaaaagactctccggaaggattaattacacagtgaacaactaatactctatggaattcttaaactcatctcttggaagttcttaaaatcatcttttgtaaatactaacatcctcccctccccacaaaaattgcaaacaggggaaggaaatggtaggttctgcatgtccaattcaccattttgttttcataaggatccctcaatcattctgtttgcttttttaatgttagcaactattaaggcccccatgttctatggtattaaggcattgtttcctgaaggaacacactaacttataatgaacaaagaagccggccaaagagcctaggtaaaatttcnagatacaattgtttttcttcnttgggctgaaaacttccggttacnaattggtttcagagcattggggc

SEQ ID NO: 453 - DNA, 407 bp, Homo sapiens
tacaaagaaaatgttttaataaaatattcaatacagtatttccctgtgggattctagaagaagaagtgagatgctgaaggaagtgactgtcactgtggggaacccagtcctaaatgagacaagacttagctttccttcaaagacaccttgtccagctctgcccaacaggccgcaatgagatggaccaggaaaccttcaggagtcaccgacagacaaagcgaatgaactgaatccacttacaaacagatccacttaagcagtttttgcctcaggcttcctaccaaatgcagttatcatggagaccggagaaggctgatgtacaaaacgcattaacatgattttgttttttcccctcctattctatttgcatttccagagtgatcattagtaacacagcgatctgggtt

SEQ ID NO: 454 - DNA, 470 bp, Homo sapiens
  misc_feature (55)..(55): n can be a, c, g or t
  misc_feature (70)..(70): n can be a, c, g or t
  misc_feature (178)..(178): n can be a, c, g or t
  misc_feature (464)..(464): n can be a, c, g or t
cacagtacaactcaacactttattccattgtgattggtatacatgtaagattganacatcaagagactanaaatcagtgcagaacttctctgaactaaagggccgtgaaaggcatgattggttttggcacacagagtgggataaccatacattggctgggaatgaggtggtcaggaanataaaatgcacaaatctaacaccatgttgaaatcatgtctgagttctggagaaagttaaacgtgtaaataattacaaaggactgacatgcaactctttaccttacattattcatctacagactatttttctcccttagagatgaggagatggccttagtaatctgttcagagtagctgaaaagaccaatcaatacacatttagaaagatctgcctgatttctataggcaattcattatagctgaagaaataatggctaaataatgtattttctctatatcatcctntaacta

SEQ ID NO: 455 - DNA, 484 bp, Homo sapiens
ttttttttttcacatataatgatgtttatttgaatagtttacaaaatcaatgaaaagtcatttcataccactgatatccttactttgactttacctgtttttcgatgtttcgaagaagtaaagtagggctgcttggtgacatttcaaaatcttgttccggtacaggatcttgacactcctggggaacctgaggattccctagaatgtttagtgaagctgcttggtctgcaaattgcatttgttttttcaaaatatcttttggaagctgacattcttctaggaccactatccccttggaggcacgaatttgcctgtgaatgtctgttagttgttggattttgcattctaggtctgaaatctgagcttgaagccaagtccatcggctgccaactcgtgctctgtctacaagccacttccattcagtactacagttaactgccacattttttctaagggtatattcatccaaatcgtcatcagagct

SEQ ID NO: 456 - DNA, 564 bp, Homo sapiens
  misc_feature (348)..(348): n can be a, c, g or t
  misc_feature (358)..(358): n can be a, c, g or t
  misc_feature (464)..(464): n can be a, c, g or t
  misc_feature (500)..(500): n can be a, c, g or t
  misc_feature (516)..(516): n can be a, c, g or t
  misc_feature (525)..(525): n can be a, c, g or t
  misc_feature (545)..(545): n can be a, c, g or t
ttttttttttttttttttttttatgtgtttaagagtttattaggataggcacataacagaaagctcaaaggacaacaaagctgcaccttcctaaaggctgaccctcaaagcaccattttgttagaactcagaggagaagctcgatctctgagccttccctcctcacagtttgggaaacatgcacaggatgaaggtaaatcctgcatagaaatcttgtaattccagaattagtcaaacaaatttgaaatacacacatttaaaaatacttacattctcatttagcattcatgaagtgattactgacatttacaattacatctgacatcacagagcaagcctttgcagggntctaattcangcttaagccaaatctatgcaaagaacttcagctcagaggaatagtgggcaaaatctgctgaaaagaactgcttgccaccttgcagataagggcaacagcacaatanagggattccagagcttctacctaaaaatagaagggnttatctacaaggaacnggacccaancccaatttatttttaaacangcccttcagtgaggatttg

SEQ ID NO: 457 - DNA, 468 bp, Homo sapiens
  misc_feature (468)..(468): n can be a, c, g or t
aggtacttcaaaagccacatttaattcaaaataaaatgagcatttctgacagatgacaacagtatgaaactgatttttttctttcctagatacaaaaatgatatggggcatttcttaacagtttagtaatcgtctaagaataattgtagaaataaccccaattccaccatcccagccactggtataaaacaaataccttccatgaaactgtctttcacataactaaaatatcctcacttacttggaacaatttcatgcttacacatgatcacaaacatttgtttttagatgttgtggaattactggagctgagatttctgaaacaatatctgaatcttagcagagagataataatcctttcactatacattgcttgggcttccttaaccaaatctgagtaactactggtaataataatgctggtggtagtccatgatactctcaaatttttccctttaagaaatatan

SEQ ID NO: 458 - DNA, 283 bp, Homo sapiens
tttcactctgtttataatttaggtggattttcacatctcaagccagctaagagtatgggaaataggactcgttaaagcacaggtatcacacaagtgattcagattcacgagggtaatccagatgaaggtatatcattgtacctggcccgcatcactcaataactgtcacctttgatttattgatttacttgagatggagtttggttctgggcaacaagagcaaaactccgtctcaaaatagataaataaaataaataataatctgtacatttatatttatgta

SEQ ID NO: 459 - DNA, 517 bp, Homo sapiens
tttcatttttacttaaatctatttattgaaaaggtcacaataaatagaatgccactaccacttgtcctaaacaataaagtagccaataaaaatataccattaaaacaaaaacagtgctaaaaaagtctggaattttttccacctgccctaagcccaagtcctgctctgattttgtgccacttaatgcaggccccataccacctaaaagtatcttgggaaccaacggacccacccacactttggaaatgctggactaacgtctccctctgcctcacgcttaacacaaaggggaaacacacacctgtggtcccctctctgatcataccttcaaggcaccaccagatcccctccaaatatgcctgctctcacaccaaggcccagcaagtccctctcaacaaacccacccctatcagccctcagaggtcaccgctgactcaggtgggacacaggtagacaaggccaaccaggaggaggccacgaacaccaagcatcatgagcaggaagaggagcaggatgg

SEQ ID NO: 460 - DNA, 482 bp, Homo sapiens; identical to SEQ ID NO: 204
  misc_feature (6)..(6): n can be a, c, g or t
  misc_feature (173)..(173): n can be a, c, g or t
  misc_feature (177)..(177): n can be a, c, g or t

SEQ ID NO: 461 - DNA, 181 bp, Homo sapiens
  misc_feature (4)..(4): n can be a, c, g or t
  misc_feature (37)..(37): n can be a, c, g or t
gcgnccgcccggtcctccttcccagcccagtgcagcnaggcacccgggttcggcttgctcaggtctctgtccgggactgggaagccacggagggccgggaaagtggcacactcctggagctcaagcttcctactctctcatcgctgaaataactacggggcaaggactgggttggaaaaag

SEQ ID NO: 462 - DNA, 467 bp, Homo sapiens
  misc_feature (370)..(370): n can be a, c, g or t
  misc_feature (413)..(413): n can be a, c, g or t
agagaatacagtaaatctttaatttgtataaatatttaaataaacttcatatttttcatgacatacttgagcatcttctatgaatatgcattttatataaggttttatgctggaaacagctatacacaatttctgatcaagactttttactcatgatctcttcaaattcttgactattaatgagaaatgattgttgttcacacaggtggtggtaagtggaaaaggagaatttacctatgtttctacccattaccaggatttccatttcattcctgaaatcatttaaatcccattaaacaatttaatagttttaaaagaacaattctttcctccagttattggcagatattactctactccttttgctacnaaaccgaatggttggtcccgcttcccccaaattcacaggctgnaatccaatcccccatacgatgggatcggcaggtagggccccggggagatggata

SEQ ID NO: 463 - DNA, 464 bp, Homo sapiens
ttttttctcatgtgaagagattctttatttgattttcatcacctttcaatgaaagagtgggtcctgtcagcactacgtaaaatatatatcttaagagcattaatttctttttaaatgaaagacagtgaagaaagtctgtgttagaaaaaggcataatagaagcttggttaaatgtaagcaggtttctatcaagaaagaataaaagtaccattactccattaaaccagtaataaaaacatactattgtgcatgttctcaaaatagttgttcataaaagtgaagcttgttagtccttttcttctttttagtgaccaaatcaacatgctgtgtatctaaccatcctggcatgacatgagtcaagggaatgagaagcatggttgctaactctatgctcaaaggaggtttctgggtaggaataccagccctgttttccagaaggtagagagatacataacagtttcaga

SEQ ID NO: 464 - DNA, 432 bp, Homo sapiens
  misc_feature (1)..(1): n can be a, c, g or t
  misc_feature (364)..(364): n can be a, c, g or t
  misc_feature (412)..(412): n can be a, c, g or t
nctccagaacacagtgctgagccgatcagaaccttcattaaagccaaagagtatttatcggatgcgctccttgacaaaaaggattcatcggattcaggagtgagatccagtgaaagttctcccaatcactctctgcacaatgaagtggcggatgactcccatcttgaaaaggcaaatctcatagagctggaagatgacagtcacagcggaaagcgggggaatcccacatagcctgagtggcctgcaagatccaattatagctcggatgtccatttgttcagaagacaagaaaagcccttccgaatgcagcttgatagccagcagccctgaaggaaaactgggccttgcatgccagaaagcctancaacctggaaccgaactcccaggcaccgtggacttttgaacaacattngtggttccagccaacagagt

SEQ ID NO: 465 - DNA, 342 bp, Homo sapiens
tttggaatgtaaaacaagtaaactttattcgggagatggggtgaatccatcactggttactggaacccttcgtctgcattttctcctcaggaaggcggtctgaaatggagtgggctgtgtttggcaagggttgtagtggtttggaatctgcttggctcccgagctgggcctcaggcctgtctccccagagtaaatgcccgggatcattgaggaagcgttggctgcgctggcatgttaggcaggtctgtacggtccagcgctgtcccctgcagcgtctctggcgctgggtgcaggtgaggcccgggacgaggagggaagagcagcctcgacagagagtcctct

SEQ ID NO: 466 - DNA, 371 bp, Homo sapiens
  misc_feature (4)..(4): n can be a, c, g or t
  misc_feature (119)..(119): n can be a, c, g or t
  misc_feature (172)..(172): n can be a, c, g or t
  misc_feature (273)..(273): n can be a, c, g or t
  misc_feature (324)..(324): n can be a, c, g or t
  misc_feature (336)..(336): n can be a, c, g or t
gttntttttttttttttttttttagagcagaggagtttacagctttattggacactgacttgtttcccctcagccacaaagagaaaaagacccaaacaaaagtccctacattttcttgnataacttaaaatacattatatcattactacatatttatacttcaataaatctnaatctataaagcacattttttataattgttatcagaaaacctataaacaagctccattctgcctcacttttccaccagctgggccttgcatttattactangctttttaataggctcatgcaaaatctcaccttccatttttagaacttggntcccaagcaccnagatattaaccaaaattctctggaaactagggaaa

SEQ ID NO: 467 - DNA, 406 bp, Homo sapiens
  misc_feature (197)..(197): n can be a, c, g or t
  misc_feature (359)..(359): n can be a, c, g or t
  misc_feature (377)..(377): n can be a, c, g or t
  misc_feature (395)..(395): n can be a, c, g or t
  misc_feature (406)..(406): n can be a, c, g or t
gaatagccaaaaaattttcttggggaaaatacgagagtaaaaccagagcctaaggagctataagaatttggaatggcttcttgaaatcatgccgctccaagtatgtcataacctcgatcactcaaaaatacataactcccaaaccaagaatttctgagggcaaaagcacaccagcgtgtataggaaaggcaggggangggatggaagggagagaaagagggaacaatgtagatttcctgttttataccaggaaaactaaggccaaactcaatttaaatgaatagctcccaaagcagtgcagtcagaaaaagttctcagtgtgaccatagacttccaggggaaaccaacaccgttcctgnaaggaaaccattgatttncccctccaaaggccacanagggatttttn

SEQ ID NO: 468 - DNA, 438 bp, Homo sapiens
ttttgagcttaaaaacagtatttttatttttaaaaaacctcaacattaaggaggaacccttctctgaagcacatcactttcctattaaaaaataaaaaaagtacagtagaaggagcacaggacaactctcttcacacaaggaagctgtgtgtttacacaattcaaacacccagaatcaaaaccacattctcccattaacttgtgaagataataaatttgctttgataagttctttcaagaaaagataatttttctcccaaagcacaccaataaatatttatattaaaaaccacagttaatttaatcaggcacagaagaaaaaatcatttttacattagtctttgtagataagaaaaatttgatttacagtgcatattccaatcccaatctgggtttgtcctcaaaattttgagaaatagcataaagaactattttgcc

SEQ ID NO: 469 - DNA, 414 bp, Homo sapiens
  misc_feature (19)..(19): n can be a, c, g or t
  misc_feature (21)..(21): n can be a, c, g or t
  misc_feature (23)..(23): n can be a, c, g or t
  misc_feature (386)..(386): n can be a, c, g or t
  misc_feature (393)..(393): n can be a, c, g or t
  misc_feature (399)..(399): n can be a, c, g or t
acatgtagggtgaatccgnantngtctggggtcaggatttggcccacagtctatcagtttgcgtcatctagttttagttttgactttaggtttcttgaaggaagggaccaagcctgcttttgtcatcattatatcctcacggcttaggtgtaagcctgtcagagagcctgggtacaggaaaggcacctgtttgtaaaatagatgggtggatggaggggagggtaggcagatggatgagtgaataaattcttacagtcttcagagcacaagtatttcaaagcagcctacctgggaactgctcatggtcctgctggccacctagaccaccaatgccctgacttctatgccctcttgcagagaatccgtgcctggggacaagtagtccnagaggtnatcccnccgccagaaaggtta

SEQ ID NO: 470 - DNA, 311 bp, Homo sapiens
ttctttgagttacattttattgtgactctaaaggtttcatactccagatgctggggggaagggattactgaatctagaaaaggtacacatgttcaaagcaacacaatttaaagaatgctcttctaacatacaacatatctccaatttcactggatgtgaagaaataccaatacactaatgaatacaacttaatcatctcactcctcagaaatctaagagcatcagaaataaggctttatatatgaggctttatatatgcaaaatataaaagtatccctaagtaacattaaatgtatatattaaatttaaac

SEQ ID NO: 471 - DNA, 418 bp, Homo sapiens
cactcctccagtagcggctgacgtcgtcaatggccgctatgaggaggtgagcgtgtccggcttcgaggagttccaccgggccgtggaacagcacaatggcaagaccattttcgcctactttacgggttctaaggacgccggggggaaaagctggtgccccgactgcgtgcggctgaaccagtcgtacgagaggggctgaagcacattagtgaaggatgtgtgttcatctactgccaagtaggagaaaagccttattggaaagatccaaataatgacttcagaaaaaacttgaaagtaacagcagtgcctacactacttaagtatggaacacctcaaaaactggtagaatctgagtgtcttcaggccaacctggtggaaatgttgttctctgaagattaagattttaggatggcaatca

SEQ ID NO: 472 - DNA, 246 bp, Homo sapiens
ttttttttttttttttttttttttttgcgtgaacacactgtaccatctttaattttataggaaacatgtggaattaacaacgtggacaccttatgtggcacagctgttacgctttgaggaaaggcgattgctggtaagttcttcaggaagaaacaccttcaaaatggaaaacagctgacatcaattaacttctgggctttctgtaattttgtatgctgggcctataatcgtaaagtagcaaaacat

SEQ ID NO: 473 - DNA, 330 bp, Homo sapiens
  misc_feature (88)..(88): n can be a, c, g or t
  misc_feature (240)..(240): n can be a, c, g or t
  misc_feature (275)..(275): n can be a, c, g or t
  misc_feature (299)..(299): n can be a, c, g or t
tagattattatgtagtaggttagatccctcttgttttgacttccactgactcattctgaaccccctaagcacccaggccagaggaagnaacctgggctgtaactgccacctgacaccgctgactggctaaatgctttgcagaaagtgatgaccttacaccacaaccagcttctccagggtcatatgtgccttacctccagagagtcttttttttttttttctgagatgggagtttcactncttgttgcccaggctgggagtgcaatagcatgatncttcggctcacttgcaacctccgnctcctggggtttcaaggagatttttcctgcc

SEQ ID NO: 474 - DNA, 411 bp, Homo sapiens
ttcacatttcaaataggacataaaggtccctagatttttaatcaaaatattttacaatttttgctctgctagcatgagatcaacaagaaaacccaacaggaatacataaaaaacttaacaagttgactttaataagtaaaaattacaacattcttctcccagcaatgaacaatttcattttttaaaagtaaacgaggcctaaaacaagagggcacaggaacaagtagtcagatggatttaggtgagcactgtacacaagctttgaggaagtgcaaaggactgacctctaggccagaacaagatggaaaactaccaggcccatcaggcctataacccagacaccagcatggacaaaactcagttatactgaattcagagacaaaattcagtgacactcttctaccacttatt

SEQ ID NO: 475 - DNA, 242 bp, Homo sapiens
ttttttttttttttttgttcttctgatttcaatttttcatttaaagcatcattttcactcttcagatcattgatttgcttctctagcgattcctgcttctcagaaagtaaatcttcaagcgatttcttttctatttcatggcctttcttaatttctgaaagggaggcttcataggccttctttagcaattcaagtttctctgagtggctagcttcaatttccaacttagaggtttcatgcgc

SEQ ID NO: 476 - DNA, 197 bp, Homo sapiens
tttttttttttgaacttaacagatactttattgctcacctttcacacaaagcacacctccagccattttctttcacagcttgacaatgtttacatgtacaaaaacccagcaagaagcatcatgtcatgtagatttcagtaagggagaatgtaaaacatcaactcagccaggcttttgttttctgcagcaataataaa

SEQ ID NO: 477 - DNA, 404 bp, Homo sapiens
tttctatttaatagtgtctgacatttattaaaaataaggaaaaaacctttgtacaggtagtgtattagagcagggaagggagcagggcttactgtgttgaacaaaaggcacccatcagagagacagctgcaaattcagaagaaaacaggattctaggcaaaactaactggtccacaggagaaaatgagagattcgatttggttgccaggcacacttaagccctggcagctatgtggcaggaacacaagaggtctctggggatggggaggaaatgggtctcgctgaaggtgacaggctccttgggggacggccagctgtctggatcactgtccaggggctgtgtccagctcggatacctccgaggtgagtccacatcactaggagccacagtctgttggtgagat

SEQ ID NO: 478 - DNA, 337 bp, Homo sapiens
aaccttttcttacattttattagcttacagattctgtcagtatgtctcatgtatatattatataatatttatatatcagtacaatgcctctctctaggggactcgcataggcttaagaatggagtcctggtgaattttccattctggcttagagtccttaaatggtggtcaggtgttttcccaactgtccagtggaccttaggccctttggccaaagtgcaagccttctgccctctgctgcatgggcagcgtggctcagctagggaaaccaaggcagaaagggtgacagtgaggctttggcattgtaggtaggcgatgtggtgtacaggcagcaggc

SEQ ID NO: 479 - DNA, 374 bp, Homo sapiens
  misc_feature (14)..(14): n can be a, c, g or t
  misc_feature (17)..(17): n can be a, c, g or t
  misc_feature (107)..(107): n can be a, c, g or t
  misc_feature (114)..(114): n can be a, c, g or t
  misc_feature (116)..(116): n can be a, c, g or t
atggccgcggcacnctnctttctaagtcggcttcgagcacccttcagttccatggccaagagcccactcgagggcgtttcctcctccagaggcctgcacgcggggcnggcccananggcttctccatcgaaggcaacattggcctgcactgcccaaagtcttggaaacttgctggatatgatgtaccgggagccagcacgatggtcctacacattccagacattttcctttttgagccgcctgaaagtacagctgggagcccttccctgaggaaactctttacagggccagggaagccagttacagatcttttgaggaggtctgtgtaacagtggacagggttccatttttgagggtttggatggaacatttcc

SEQ ID NO: 480 - DNA, 446 bp, Homo sapiens
cagctcacttcaagggtacctgaagcgaattggcaccaaagcagcagctgtattgccgcagttctagcttcaccttcacgatgtttcccttggtcaaaagcgcactaaatcgtctccaagttcgaagcattcagcaaacaatggcaaggcagagcacccagaaacgtacacctgattttcatgacaaatacggtaatgctgtattagctagtggagccactttctgtattgttacatggacatatgtagcaacacaagtcggaatagaatggaacctgtcccctgttggcagagttaccccaaaggaatggaggaatcagtaatcatcccagctggtgtaataatgaattgtttaaaaaacagctcataattgatgccaaattaaagcactgtgtacccattaagatatggcattattgaaggaataaagtacatgtgaaaccttc

SEQ ID NO: 481 - DNA, 454 bp, Homo sapiens
aggacctaaggacatatctggacaaggcacccccaccaggcttgccagccgaaacgatcaaggatctgatgcgccagtttctaagaggcctagatttccttcatgccaattgcatcgttcaccgagatctgaagccagagaacattctggtgacaagtggtggaacagtcaagctggctgactttggcctggcagaatctacagctaccagatggcacttacacccgtggttgttacactctggtaccgagctcccgaagttcttctgcagtccacatatgcaacacctgtggacatgtggagtgttggctgtatctttgcagagatgtttcgtcgaaagcctctcttctgtggaaactctgaagccgaccagttgggcaaaatctttgacctgattgggctgcctccagaggatgactggcctcgagatgtatccctgccccgtggagccttt

SEQ ID NO: 482 - DNA, 329 bp, Homo sapiens
  misc_feature (311)..(311): n can be a, c, g or t
gtgatatttttggcgttttattaaaaatggaaaaagttgttttagtgagcactcatggtgctttctcccctcctcccccaggcagaccccaaaagtgtcagggaaaggcaggccccctggaggggtgcggtggggctgaagcaggggctgctatggctaccagaggtgagctggtgatgtgagctgagttgtcacatgacactctccaccacgacgaccttgctgctctcggacactggggtcagggtggtcaggcccctgacatctgcgtcctgagctcggtactccaagtggtggaggccccagatggngctgggtcaggtgctgcc

SEQ ID NO: 483 - DNA, 631 bp, Homo sapiens
  misc_feature (218)..(218): n can be a, c, g or t
  misc_feature (477)..(477): n can be a, c, g or t
  misc_feature (601)..(601): n can be a, c, g or t
acctttgtctccaggtaagccaggtgaaccttgtgggccagggatgccaggcacacctttctctccaggtgttcctggcaagcccattccaccaacagatccttttggtcccggaagtcctggagcacctggggttccacttatacctggatcacctttaggtcctggctgcccaggctgtcctgcctgcccgtcctttccaggcactcctggggtcncagggtctcctcgggatcccttctcaccaattggtccaatttgtcctttctctccttggtctcctttctggcccttcatgctgcccatgtccaccttatccatggagccaggcttgcagggagaccgacatcccccttatcacctttcaagccagggtctcccctgggtcctgaggagcccggaaagccatgggtcccctttttcacccggtaatccaggagcacccactggtcctggtgagcccggctgccgggggtncccatgacgccatttctcccttggaacctgggaaaccaggaatccaggagcccctggctgtcaggaaggcaaggagcccgaatgtccgttatgcaaggagtcttgagcccttattccctcgtgngaatcttggctcaggcaaattcctatattt

SEQ ID NO: 484 - DNA, 188 bp, Homo sapiens
aaaagaattgtttatttaccgaacctggggcatattagatacaaccaattttaaatttacatcttttaaatcagttttgaagtgtttcacacacacaaaaaacttggcatgcaacagttgtcctaaggtgaaagtcacctcattaataaactgttgcaagtgttctcacccaaggtggaagtatggtt

SEQ ID NO: 485 - DNA, 399 bp, Homo sapiens
  misc_feature (296)..(296): n can be a, c, g or t
  misc_feature (301)..(301): n can be a, c, g or t
  misc_feature (349)..(349): n can be a, c, g or t
  misc_feature (393)..(393): n can be a, c, g or t
tagtagagacggggtttcaccatgttggccaggatggtctcaatctcttgacctcgtgatctgcctgccttggctcccaaagtgctgggattacaggtgtgagccaccacgcctggccggcttatttttatccacagtaaatcttcagcaactcattgtctccaccagatagtatttttctgtaaatgaaatgctgacttcgcctcttcctgctgtatgctcatccctgcactgagcacagatatgacaagcagtagccatgggggaggtgggtgacaaagataggaccccgggangccgncaaggtacatgctagtttcaattaccacagtattctagagacgggttncaatgacaaggggggcaaattgaaatcaatgcaagatttcttantaatgg

SEQ ID NO: 486 - DNA, 410 bp, Homo sapiens
  misc_feature (25)..(25): n can be a, c, g or t
tcaatttacagaatttttattgtanacagaagctcattactagttattacaaacttgaatcaactgaaactcaagttagcaatgtgaaacacatttataggcttatttttgtataccataattggtaatttttgccccctcaatacttttaagaagactgttaaaattttcagcatttcaatgatctcttatttgtcaggtttagcaccatgacattctcattcccttaaaaaaacactcattcaaatctaggtagaacttccacctttcatcatcaaaattatcacacaaaatttattttgtttttttcacaatgcaaaaagaagacaaataagtatattttaaaatattatcagcagtccgttttgtgtggttttacatttttctgtctgcccattattaagaaatct

SEQ ID NO: 487 - DNA, 205 bp, Homo sapiens
tttttttttttttttttttttttgcacactgatcatgactttatttaaaaattagcaaacaatactgtagaaacattgatatgtaaatttctaaaatgctgcatcttaaatttagttggcaaagaccacatttagcaataagcatgagtttagtcttccatgtagaaaccagatacactaaactgtaaaaaaaaaaaaaaaaaaa

SEQ ID NO: 488 - DNA, 390 bp, Homo sapiens
  misc_feature (356)..(356): n can be a, c, g or t
  misc_feature (363)..(363): n can be a, c, g or t
  misc_feature (370)..(370): n can be a, c, g or t
  misc_feature (388)..(388): n can be a, c, g or t
gcagaaatgtttattgaatacagtgccaggtttataaataaaacgtatttacaatttccatagagttggtcccccatcagagaggtggttaaatctccaaacagtttatctcaagatttacagaaacgtccaagtacatctccttttcaaatagccatggtgaagggcaacttcagtaacaaaagaactaccaccatctttgctacagaagtgtttaataaacatcataatagatttggagaaagaacacacactccacccatgccactaccttcttactccaaggggatacaggacaggcaaaggatttctgtctcctacaggggcaactttcgggggggtttaaaaaaacggtnactgccngttgggnggggttgggtttagggcnct

SEQ ID NO: 489 - DNA, 168 bp, Homo sapiens
ttttaactttggggatgtttattgcaaatggttataatttaagtgatatttacaattgtttaagacagagggcaaacaggctctgagccaggcctcagctttagaggcccatcctggagaggaaatggcacttgcagggaacatgagctcaatcactattgctcacta

SEQ ID NO: 490 - DNA, 348 bp, Homo sapiens
attccagactctattttatttaaaaaatcagcccagatacagtatcagatattaacatacacacattgttgcattatatatttgctttaaaaattacataggttgtatgtatttgatttgagactataaaataaaataatggagtatttacaagctcatttttcacaatttctttttacaaaattccaagaaaataagaaatccttcattgattttctttatataaaatgattgctaatttgtttatacagtagaaatggaagggacaaaatttatatttacagctaggaattccctcccactgtttggtaagacagcgagaggttgacaaggtgttttgtagcatca

SEQ ID NO: 491 - DNA, 419 bp, Homo sapiens
gatgttaactttggaactcgcagtcctctagaacagcttcagattatggctttttcttttgaggaagaaattattcactccagatgcatgccctgagccagacctcactgctgcactttccaaggtgctaagattgctgctctccaatgctaactttctgacacagtgctctagaaccctgcctgtggtcctgagcactgatcagcttagctagaccatggttgactcttcttggagattttcacttggtcctagaatgtggcaacgtagttgtgctcgccagaacgtgggaccaaattggcctcaggtgttgagtccagacttctgcttttgagagagggctgcactttttcatggtatttctaggggaggtggtaggctgcatgtgccacttggtcttgttgtgagtatgctgacac

SEQ ID NO: 492 - DNA, 469 bp, Homo sapiens
  misc_feature (422)..(422): n can be a, c, g or t
  misc_feature (429)..(429): n can be a, c, g or t
  misc_feature (434)..(434): n can be a, c, g or t
  misc_feature (441)..(441): n can be a, c, g or t
tttttttttcacttaattatacatacgttttatttaaagaaaagcaaaacacacaaccacagcatttcaattaaggagcttagaaaaatttcaagtgcgttcttggttctccagttaccattccaataaaaaactttttaaaccaaagttaaaattaagtgaaaaagaaagaagtcccagtaagcagaccgaacaatacaaattcaaaatactactctatcttcttgtgttcgttcccaccaaagtgtgctgtttaaagttccacaactattatcttcctcctcttgttctttagtgagttctacaaaaacctgttccaatgttgcttgaggaaaagctatattcttcaatgggcaaaagcatgtttaggcttcttccagcttaaaaaaaggttgtggaaagggggactggaacatcttccntaggganttttntagggcnaaataggaggaaaaacttcccgacgggt

SEQ ID NO: 493 - DNA, 314 bp, Homo sapiens
  misc_feature (13)..(13): n can be a, c, g or t
  misc_feature (17)..(18): n can be a, c, g or t
tggcgtcagttgnaccnntgaaggacaagaaacttctggaggtcaaactgggggagtgccaagctggatcttgatgcgggacttcagtcctagtggcattttcggagcgtttcaaagaggttactaccggtactacaacaagtacatcaatgtgaagaaggggagcatctcggggattaccatggtgctggcatgctacgtgctctttagctactccttttcctacaagcatctcaagcacgagcgggctccgcaaataccactgaagaggacacactctgcacccccccaccccacgaccttggcccgagccc

SEQ ID NO: 494 - DNA, 382 bp, Homo sapiens
  misc_feature (236)..(236): n can be a, c, g or t
  misc_feature (320)..(320): n can be a, c, g or t
  misc_feature (323)..(323): n can be a, c, g or t
  misc_feature (377)..(377): n can be a, c, g or t
agagaaacgttgtgtttaatggtaaagcttaacacaccccagcaccaagaatggtgtggagttgcagtagcaacaggccggtgaccccccatggagcctcacatggcgaagaggatgaggaaggcgaccatcaaacagaaaagccccatggcctcagacagggcaaagccaagaatggcataggagaagagctgctgcttgagagacgggttccttggcatagccaattgatcaangctgccaaacacggttccaatgccagcccctgaaccagccacaccaactgtggctgccccagcaccaataaactttggctgctngtntcaattgtcccgggagacaacacttggtcttggaactcccgtctgggccacctnggagt

SEQ ID NO: 495 - DNA, 469 bp, Homo sapiens
ttattttatttaatttatttatgtaatacagtgtagaaagcgatcatgtcataagcaatgattctgtacaatcatcctgcagaaaattgttttggagaattcttggtaattgaagaccagcagacacccctccccacccgccccgtaaaagtgcttacaatgaacagggattcttttctttatcaaagacccaaagatacgtggacaaaaaaagaaaagcttgaagtctcaatgcctaatgtgtgcacataaaacaggcacgaagaaacaaacgtgtgtatcctcttaattcctatatcacaaatatagcagaagcagcaatctgtacagtaaaatgcagtcatggaaaaaaaatctctctaaagcatctgaaatacttaaaaatgtttaactttaaaatgcatagtgatcaggaaaggaatacttaggcaagagaagcagctgaactcccccgttcacatgaagcatc

SEQ ID NO: 496 - DNA, 438 bp, Homo sapiens
tttttttgtttcggtcaaagatggcatgagagcatcgtttccgtaactgatccttggttcactaatcatgttggccaagacgtcatctgaatagttttgctctttctgaagcagctcatcaacttcatcctgaatctcctcggccactgcaggcacgttgtagagcagggagagagactgattcatgcgctcataaatcacacggaggtgtgtccataacctgggaccggatctgagcggctttcttgggatccaccatgcgcacatgctcgaaatgctttagggtgtgctgtctgtccttctgttctgcgcggacatacttctttagcatattggaacacgtgacgaggccgaggaggaacagcctgcagagcggtggatgtagttctccagggccaggcggcggcggtcattgagcatggcttccactctgggcat

SEQ ID NO: 497 - DNA, 471 bp, Homo sapiens
  misc_feature (1)..(1): n can be a, c, g or t
  misc_feature (422)..(422): n can be a, c, g or t
nttttttcagttacacttttccttgctttaatatttgttgtctttttctgcttttgaaatgagctctcaattacaaaataccaaactacactcaaaagagggtgtagaaaaagccagccattggaccagcatggagaagcccacaagtaaggacagatagcagcagcaggtggcaagaggtgggaggtgactgaagcagtggttacaaatgttcacaggaagctaaaactatccaacaggttgtgccctaatgttagcacaggttagactagttactaccttgctaggtggcctcagtgtgttcagattctacgcagcaatacaatttcttccagttaagagttcttgacttgcaccgatcacagcatggttgaagggtactgggaccagtcttgttagtttttcaaaatgctgtcgtaganctggatagatgtattgagagacttcaggagctctacacttcagtgacag

SEQ ID NO: 498 - DNA, 22 bp, Homo sapiens
  misc_feature (22)..(22): n can be a, c, g or t
ttttttttttttttttttttvn
